United States Patent Application Publication US 2019/0183130 A1 - sequence listing, part 10

SEQ ID NO: 1 - DNA, 19352526 bp, Cryptococcus macerans (residues 17,417,278-19,352,526 of 19,352,526)
tcgtggaagctgcggccggcgagcgagtgtgagctgtcagcgaggcagctcagagcagaaggaaagatggaaggggcgcaccggcttccctccttcgccgccgccgtctcgggcgagtccttccccttccccgacagaaggcccatcgcaagcgggctgtatgcatagaaggcgatcttctctttgcgtagcgtcggaaagaggtctgtgtctgccctccgggcgagcgcagaataattgccctgatagacggtcggcgcgatgaaggagtgctcacgggcgatctgatgagtcggtccaccatcagtcgagcgcaagtcaacatgagtcccgagtgagcatggaagacctacgtcgcagatctcggccacctcttttgcgctgtagtttgacaagccgaactgggtggaagggcgggtgatcaggctctcggcaaccttggcgcagcacccgatggccgctcctactcacctcgttgaacttgccctccttgtgcagcttgtccatctcgctcacgagatgcagcagcggagtctcccgatcgggctcgtgcgagtagaagacgttgacctgcgccggcaagatcgggcggtcagggcgtgatccgaagggaaagaacgcaagctcggcgcgcaccttctcgagcccgaggtcgtggagcgagttctcaagcgactgcttgatcttgtcgcctgcgagagagcccatcaagatctgcccagcctcagcttgtctgtcagccttcctccagcatcaagccgacctcgatccaggacggaccttcgtgtcgacctcgaggtgaaacagcccgacctcgcgcagcgcccgctccgacccgcccgggccatgcttgtccgtctcgccgtacagtcttgccgtgtcgatccgcgagtggccgtgcgctgcgaatgtagcgacgagtgcgcgttgagagtcgagcgtgtggtgagtgtagagcgaggttgggccgaggttggacgtgccctgccgatcggagaggggcgtcagtcagcccggcggatcgcccatcttctagcactcaagcagtcatccaggaagcacaaggaggatggtagggatctgcttgaactctgtcatgctggaaagacggcctagaggatgatggatgaaagggcgatgcggttgccaggcctgacgagctcgccatgctgtcgttcgaccgctgatcttcggcgtcctccggctcgccgtcatgcgcagcacaaagaagcgttctcgactcgaaagtggtactcggtcggcagccttaggcaatcttgattcactaacgccagggatctctcctcaaaagtatttcgcgcttaggcgtgcgggttgtaatctcctctctggaagctccttcctctgcagccagccgagaatcaacgacgccatcatcatctgtctgtcaccctgaccttgctcatctcgcccgccttcagctcagcatgccagagggcaaacgcgctgtgccaacttggcggtcctcagcctgagagctcgttcggccgaccgcgtatgggaccgtgcgcggcgcaggctgggcggtcctcctcgcgtcgggcaggcttggctcttggggtcgaccgtcgttcgctttagccttgcgtcgatcgcgacccgctcaagcgtgttgtgctagcaggtcggaacgatggcgagcgaatgtgaacctcggccagactggatcacgccgaaggggtcggagggtgggcgctcgattccttcggtgttcgcccagcgagatgaggccgtcccggagccggtcaagccctaagagtggtcgtgagtcgtccggctcgtacggcggaaggccaagcgtccttttgctgcctgtggacgaccggcacccgatccgcccgtctgcccgctccttccctcgcgggcctcactcgcgagcaacagcgaccgaaccaggctatgagagcgcaaccggcgccgctggccctcctgttgacgacggcaaacgcccgagctcgtgcaagaccgcctgagcctgagaggcacgttcgagctggttctgtgtcagacaatgaatgcgggacagggggtcagtttgtgactcgaggtgagtcggcgcaagcgatgaagcaaagaggagaggaagtaaaagggcgaggcgtaaggagcgggacgaacaggcaggtcggaagcgagtcggctgagctggccgagcgtgtgtacaaacgtctgctcaagcgcgggcttgctctctgcgagtcggccgactgggagcatgcagcgcaaggcacagagcagtcagctgctgcaaattaaagcacgcagacaaggtgacgcgggtgacttacccgactgctcctcctcgacgccgtccatctccgatccctcctcctcgacaacccgctcgccccctcgccgtctctccgccaaatccgctaccagaccccggatggcacccggcgtcgccgcacgtcgttcggcgagctggacctcgatcagctccttctcggcggcgagggagcggaggcgtcggtcgaggggctcgtcaaacggctcggtcactgaatggcgggagggcggcgtggggagggggggaaggtcggtcagctcccagggccagtgcatggcgacacatctcttcaatccgctgcaggagcggcgaccgaccagcggatggctctcggagcggcaagagctaggcagccaagggggcgggaggggacgcacgcgctgggtcggcgaggaaagccgtgtacggcaagccgttgagcttgaggttcggcgccgcctggtcaaagatggccgtctcccactgagcagcaaagccgggcgtgcaggccgtcagtccgccgtcgtcagcctatggagaggacaagaacgcacttcctcgagctcggcttggatggccgcccgttcgaccgggtcggcgacccccgccagtttcggcccgagcaccttgagcatcgcggcgtggaagctcgcctggatgcggacgaggtcgtgcggcgtgtcgagcgggatcaagggcggattcgtgtcgtacgacatgcctgctggctgatgagagagaatgaagggtggcagggggaaagtgttggccgagacaacgcgtccacgactgaagggcccgacgcggcgggtcaaccctagcttttgctccgctggcgttgaaccggcgcccgtccctccctcccccccatccgcgagcacccgcttttgcctgcctgcctgcgaaggcaacgaccgacccgcccgccagccctcctcctccgccacctcctcctccaccagcgccgcccttcttctccctccccctcgcccgctctccagcgcggaacacccgccgcgcaccatcgacgaccgcgcctgtgttggcgagctcgcgctgcgtcttgatgagcggccggagggcgagcgagagtgcgcggaggagcgtgggcgcgagggagtcggagaggagcgaggagaggtgcgtgtcgagcaacagggtgaggatcgggacgagctgccgtgcgcgagcgttgtatcgcggtcagctccaggcctacgatagagatgcaaggagaggagaggagaagggcgggacggacctcagctaacgaaggtagacccttgccgacgtcactccactgcgcctccttctggacgtcccctagctcagcgacccagcccccgacgaccgcaagcagccggacgacctcgtccggctcgagcgaggcgaacgcggatttccactcgccgtcgtcggagcggacgaccttgacgagcgggcggaggagcgaggagagatcgacgggcgtgccgtctgcgagctgcgggcgggcctcgtcggagaaggacgggatggcgagcacggccgaaaggagggcggtaaagctcgaggcggcgagaccggcggtcgctgatgggtcggcgacgagcgcaaagagcgcatcccagtcgctcgacttgaggagggcggcaaagtgcctggcccggccgagcgaggacgatgccgacgaggcaggccgcttgccgtttgcgtttgcgttgacggccgactcgtcggggccgttggtggtagccgggtgaagcggtccgaggaccttcgccgtctgctccttcgtaaacatgacttcgccgacgccgccgctcgaccggtcgagcccgacctcgccaacccaaacgccccacttgtctgccttgcgccccacaaacgcgaccttgcccgcgccgatcgaccgcgcggccgtgaagctcgtcgaggggagggcgtgcgagccgacgatggcggagaagacgggcgacaggaggtggatctgcgagggggtgagaacgagcgtgtagggtgcaagtggggcgagcgcgtgcggagggggcgtgaggagggcgagcggggccgaaaggggctggagagaggaagagagggagagggtgtggatgtgcgatcggtcggctgcgggcaagtggtgggtcagccaggaggtcaccgcatgcgccgcactgacagagagcacttgaaaaggacgcactgaggatctgcaccaagccatccgcgccattgacgccctcgataacggcgacctcgaccgctttctcgccctcctcccactcggcccgcttcgcaccctcgaagacaagcccaagcgtgcccttccgggccgtcatgccctttacggccgccgacgacgggaggccgaccgcccagagccggacctcgccgagcgcaaagacctcgagcaggagcgagctcgcgctgtcggccgcggtcgagggaaatgccaacggagcgtggaccgaggagtggacgagggttgatttgggcgaggcagaagaggaagcgggcgtgcgtgcgaggagggcgagagacggcgtcgccaacgaggccgagagggagagagcggcatagtcgcgcgacttgcccttggcgtttgagcccgaggccgaggagagtgcgacgagcgcccatggtccggcagcctcagctgacgacgaggacgacgacgaggcctctgccgagctcggcgctgggctgctgagggcatagaggtcgacgacctcgctcgccttgggaagcgagacgacctccttgcctgcctgctcggtccggaacgcccagagctcgctggcgcccgacgccgaggccgaggcgagcgtgatgagctctgccgaggaggaggaggaggaggacggggcgagcgtgaggggcggggcggagaaggtcgtcgaaggcgggacggtgaaggaccaggtcgggtgcagcgtctcgacctgcgggtaggcggcagcagcggcggcacaagcagatcagaatcatcagcactcccgtccgtctctctcaagcctccgagctccttccgctgctcgtgacgcacgtcgtagcgccagaggccctcgccatcgaccgcgagcgcgagctcgacggcggcgcccttgctcttcctggctgaggaccggccctgctggacgggcgcgagcttgagggccgacgaagaacccgctgcgaacgaggcgagatgaagcgggggcgagaaggagggcggcatcgttcgtgctgctttgttgaagtgttcgacgggcaggaggaggacgaggacgaggagcggggttgagaaacctccctgcgcgagagcgccgcgggtcgagctagggttaacggctcggagcctttctctcgcgagaggcacccagcactgtgggtccggtcgggagcgtcgccatcagtcgcacaggaggaggactagcggagaaaggatggcatggaatggcatcctaagcgaagcttcagcgaggatgacagcaaggcgggcctgccggaagaaggacggtctttctctttgagctgggcggctgcgcgcgtcgttgcgtcccttcgaggcctgcacgatgacatcgcatcgtcaacgccggccagatcatctttgaagatgaaagagaaggctgggtagctttatgacctcacagcgagaagacagacgatatgaaggaagtcggaagcggcccgcctcgctctgtaccacgcccagcgtccgtcctccttcgcacgcgcgccctccacgagctccgggctcgaaaggggcgagccgccctcgcccgtcaacgccgacgacaacgacgatggacctctcgcacttgcccgccctcctcggcgccctcgcgagcccggcgagccctgccgacctcgcaagcaacaccgccctcatccagacgctctacacgacgcccggtgcgtccttcgtcaactcgccctcgccctccgcgagctctcgcacgcgcctctcgagagctgacgcccttgaccgaccgactgaccgaccgaccggttggcaggcttctacgatgcgctccagcagacggcgctcgagcctttgcatacgcgcgacacacgggtcctcgccgggctcgtcatgaagaacgagatggtctcgcgctggcgggggaggtcgtccgtccccctcctcctttccctccttgcatcgcgctgtcgcaagcgccgccctcgccccagtcataggagctctctatcccgagctagcagagaataagagcctgacccgcctcgttttgacctgttgcgccgcctcgtcagcatcgtccccgacgacgacaagcagcggatccgtgagcgcttcctgcgcttccttgccgagcccgactcaaccgtgcgtgccctcgcctgtctccattcttgctctcgaacctatgccttcgcctcatttgaggggtgatcacaactcgacggacgcttgccatctgccgctagactccccagcctctgctggccgcgctttgcccgtctcctcaacctaacccccccctctcccctctccccctcggctgtcgacagattgcctcgacccagttctggatcctctcgaagctctcgcgggttgacttcccacgctcttggccgtctctcatggactcgctcctcagctcgctcctctcctccgcccaggcgtacctcgcccccggcggctcgagcgaggcgagcgtcgagctgacgaacgcgctcggtgcggtcgaccggctcatcaaggaatggacgacgatcaagctccctctcggcagcaaggtcctcactgaatggacctccctgctcctccccgtgctcgtgccgctgctcgaggagctcggccagcgcgaaggcgaggagctccgcgcgggccgggcgctaaaggccgtctcgcgcttggcggtgtgggactgggcgcgccgccggccggcaggcgacgagggcggagcgagcgagagggaggcgagggcggcactcgtctttggccttgcggtcaggttactcggccagaaggtcggcgagcgggcggcgctgcttgcggagatgcgggccgcggggagtaacgcgagcgagggggcgagggagaggctcaaggcgctgacggcgttcgtcaagggttcgctcaagttcttgcgtgtacgtccccggctttcgtctgctcgacgtctcgccctctcgcgactgacgtgccccacctcgctccccctcgcccacccgccggcgccgcagcgcatgcaagaggcgagcccgggggaatttgcaagcctgccagagtgctcggccgtcgtcctccacctctggacccggactcaggcagggctcgtcggcgacttccatgccggtccgtcgcacgcgcgcccgacgcgccgaacggtccttctgacgctccagcctggaactctacctccctcacagaggaccaggagggcgctgactggccaaacgtcttcaagatcacaacgttcctcatcatcaaggacctcctgccctcgtgggaggccaagcaccacgacggttggtcaccagcatcctcctgtatctctccatgccgcacggctgacgtgaccgtcgtgcgactctagtcctcaccccgtccctcatcagcgacctcttccacacgctcgtttcgggcgcgctcctgctttcggttgacgacctcgccgcgctcgagcacgagccggaagagtggtgcgtcgccgagtcgagcaacaatgagcagtggacgtttgagctgcgggtcagtccacatgccccttctcgtgctcgctggcggagcggcggatatgtctgctgcttgcacatactgctgacccgcctcaccctgcgtcatcatccagccctgtggcgagcgcgtgcttctcgcccgtaagtctccttacccggctcctgccctatctgcgctcaccttccggtttgtcgcccccgtcccgcagtcaacattgcctgtcgcaaccgcgacgacaagatcatggaggtcctcatgcagactaagctagccgaggcgctctgtgagtgtctaccgctctcccttcgcgctcatcctgctcgctcgacgctgactgctccctgcctgctctgggctatcagcaacaccggtgacggatgccgcctcgatccgggcgaaagaagccgtctacacggctgccggccggctcgtccgctttgtcacgcaaaacgagcagattccggccgagcagctgttgggcgtcctgcgggacgagtgtcttcggccgggcgaggagtggcgggtactcaagaggcggattgcgtggctgattggagagtgcgttcatcaactctgtttcttcgctccagtctcgagcgaaagctgactgacctcgtcttttccttcactcgctcaagactcgtcgacgccgatgacgagctcgccggctcggacgcgccctggcagccgctcctttacctcgtgacggaccgctcggcctcatccgacccaggcgtccgattgacggcggcgtgctcgctcaagtcggcgatggacctctgggagctcgatccggccgtctttgcgccctacgtccgtcgctccgtctgacccccggcccaggtggcgacgctgactctatctctttgccctttgcgtcgcgcaacagatcccccagattgccgagggcctgatggcgctcctcgacgagctcgagacgctcgagggcaagcgtcgcgtgctcggcgcggtcgaggtcatggtcgagcgcgagggagttgacgtgcgtcccttcctcgactctgccatccgtcctgctgctcggctggctgaccgtttttgtaaccgcacggcagatcacaccctacgtcgccggcatcgcgagccaggtccccgagctctggtctaaagcggccagcatcgagggcgagtggctctttaaggcatcgctcctgacgctcgtgacgaagctcgtcgctgcgctcggcgacggggcacatgcgctgacgacgctgtgcatagagctacttggcgagtcactgacgggacacgtgcgccccacttccttcccttacgtcctctcctcgactctggccgaagctgacacgcgcgagccctccgaaaacgctgcaggccaagctccagctcgacgaagacgccctcgtcctctggcaggcgctcctccggtcctcgacaacgctcgacccgcgcctcgcgcagctcgtgtccgccgcggtcgacgggctcgcaaacgaccgggacgtgctcggctcggcgctcgggatcctcgactcgtacgtcttgctcgacgggccgagcgtctacgaggtgagtccccccaccccctccttcaccggttcgtcaactcagtcctcctgggacgccctgctgaccccatggatgcgattttcgcgttcggcagagctacgccggccaaatctgccaggtgctcggcgacgtcctcgcgacctcgcggccggccgactccatcatggtgctttcgagcatcgcgctccacgtccagctcgcgccatttcagcggtgggcgcccgctgccgtcgaaacgggttcgtccttccgacctttgcgcgcgcgccgtccacgttcccgacctccggagagctgaccgtcgacctgcttgcctggagcaggcctcatcaagcgcctgattgagggcgcgacagcccaagacgtcggcaccgccctcccgcactacacctcgctcctctcgcgcatcctcctcgcctctccgatatccttcctcccgctcctggcgcaggccggcatcccaccaaacgtcttcctcgacctctggtggtcggccttcgaccggctcgcgctctcgtcgatgcgtaagcgggcggccctggcgagtgcggcgctgtgcgcgacgggcgagcaggtcgtgcttgaacggtttggcgagctgctcaatgtctttctcgacgtgcttggcgagcttaagggttagcgtgtcttctctctccccctcttttccttcttgcccagttaagatacgagctgacgcccccgtcccccgtccccctggcgaccggcagagaccgaggccgacgcagcaggcgaccaggcacagaccgtcaagagcctcgacctccactggaagcgcggggccgacgcgcccatcgtcgccggcgacgcagagggcacggccgagggcgagcggctcaaagcggtccgtttccgtccccgaccctttcccctctctctcctctccttggagtcggccgctgactgcctgccccccctcctcccttgtgggccgccctcagctaaacgcacgcgacccagtctactcgaccagcctcaaaggcttcctccgctcaaaccttgcaaacacgcccaacctcgcgagctttgtcgacccggccgagtaagcccccttcacttgctttcctcttttgcaatcccgtcagcccgcgtgatagtttgtgtgattggtgactgacgacccttcaacccccccattgttgacgacgatatggcagtccggcgtttgtcgagctgcagaagtatctcggctcatagagatgatcttgccggcctcttccttctccctccgcatcgtatctgcgaaggaagcccgcgctgaagcgacgctcggatgggtgttggtcgccttgatcggttcgggcgggcggcccataggtaaactagatcgtcgatggacgcgaggactggccggaggggcgaagtgtggacctcggatcgggaggccacgcttgggtcaccgccatgaccagcaggggggggggggctttgccccgcccgcccgacgcgtcgcctctctcttccaccaccgaccctcttcctcgccctcgtctctccctactctaccctttacattctcctctcttcccaacaatggctcgcttctctttcctctcgaccgccgtcgtcggcctcgtcgccgccgccgttgccaacgcccaggctaccatcaacaccccgaccggcctcgtcagtgcgtgacccgtccttctgtcaccggcctgcccgcccttcctttcctgccttccttcgcgtcctcggctacttgccctcgaggcgactcttctcatccgggccaggctctcgccctgccggagccagccgaggctcaagctctcctttccgtatccgccgcctcgctccgacccgcgctcttttcatcgagctaggctgaccctttgcttcgcacgcgcctcccttgctgttttcgcccgccttccctcagcctgccagccgtcgctcatcgtccgtcctctcgttcacgtctatgaccctcctctgaccgccctgctgactttcttctcccctttgccatcttttcttagaaatggacgggtggagctgtgcgttttgccccctcttgccagcgcgtgggccgccctatcgccaaggctagccactgaccctcttctcttgttccttcaggctccctactacgtgaccgtcatccccggcggtgagcccaacggcgccgtcctcaagacgctcgtcgacggcggctccgagatgcagtacacgtggcaggtcgaccttccggctggcacgtccatcaccgtccaggtcaaagacgcctcgggcacgcccaactacaccgacaaggttacgatcggcgccggctccgacacgtcgtgcgtcaacaacaacgtcgtcgtgtgcgtaccttcatctctcttcttcagtttgctctagcgtcgagtgagctagaggctgacctagagtgcattggctctcttcagtggtggagcttcgtcggccgccggtggtgccgcctcgtccgccgctgccggcccctcggccgctgccagctcgggcatgtcggtcgtcgcctcggcctcgtcgcgcgtctcgggcgccgctgccgctgcctcgtccgctgccacctccgccacccccggctcggacggccaggccaccatcggcggccgctcggcggtcggcgccctcatcgtcgccgctgccgctgtcgctgccctcgcctaaaggtcggcctcctcgtttccttgcacgaacggacactcgtctcgcccacgctcccttctctggcattcgtacggcagcccgccttttcgcgcgggtcttccgcactcacgctcccttcccactgcacacccaacatctggcatgcctcgcaccccacccgctcgctcctttacagtttcagctcgcctccttcttcgcctgctttatcctctgcttcgctcttgctgctcgtcgtcgccctgtcgccttcgatccggggcgtcgcgctcgggacatcttgatgatgccttccttcgagcctgcccgcctgcgaaagccaatggcttcatggacgtcgtcacaattgagaagtcgggcgaggtgacttccggcgtcggatctgctgcgcgcggcccaccttcgcccggtagcgttgaccgattcgacggccggttgttccagctcgccctcgacactcacccactccggcctcgcctcttgctgaccgttgcacctcatccggagttgctctgcaggagtctcgctcggacgactcattcgttgagaacgctcgccgctttcgagaagcagtacgggtcgagctccccaggcatccggcaaggccgtcggctcccgctgggcagcggcagcagcaacgtcggcgtcctcagtccctctgacagcttgacgctcacacaatcctgaagtgcggctctctattcccctctggaataagctcaagcgcacggtcgacgagctcgctgcaaggctcgggccaacctagtcactcccgctcgtctcgtccccgcccatcttcctgcgctctcaatgtcgcttgacctcctgcttgggtaacaatctctctctccttcagcagtagcttgcagcatgtcctgcggaagcgctagggcacttataaggatgtcgcctccacagctgacggtcgccggcgcgtctcatcccgaggcacgacccgcagctcgcctcttcgaggcgttcacccaacgcatcggcccaaggcaagacgctctctcttcggtcgaagcgggcagcgcgagccctcagaaggagcttgagggcggcttgcctctcttccctctcggacattacctcctctagcgcctccctccctcctcgtcgcacgccctcctcttctatcgcccatccttactgctccagatcttcgcctcttccgcccgcttcgccgcctacggtcaccagcagatcatccgtccgccatctcgcccgtcccatctcgtcgcggcccgctaccgaccttgtgctgacctcgacccacttttccctctgatcctcagccttcacttatcgctcctaactcaactgaccgcaacgacctcccatctctttcagctccctctcccttcccacgctcacctcgcgccaacgtgctccttttgcagcactgcccgaggtcgtaaaaaaactcaatgagcgcggacgcggttggtcctgtgacttgttttcgacctctgacccaacccgttgaacagactcccgtgctccaggctacgatcgagacggaggccgaagtcaccggccccggtttgaaggctgtcaagggtgcgtcttggcttccgcagagtgagccacacgtcccgtctcaccccgtctgccgctctctcgtcctgccagcgtcgtcgtcgctctcggcatcgtcgtcttcaagtccgtcgccgcgagcgacaagccgacacgcggctttgtcgcgtttgcttcggcggacgatgagctgcccaactttcgcgaccggcgggtgtgtccgtcccgctgccgaccgagctctgctcctaatcgacgctgactctccgtcctcaagctagcctcaagacgcacattgttaccttcaagaccgtctcctcgcctcagtccaggccaaccagttggccggcagagcagcgcgagcccgtcgctgccagtgtcacggcgcccgccctcgagcccgaagccccttctgccggcctatgaaccatcggtcgacgcccaaggccaatttctccgtacagcttcgggatggtcgtgacggcgtcggtcgacttccgcgtcacagcgacgcttgcgcggtccgcgtcgagtcgaacgccgtaacgttcgcagatcacgatgcccacctcgacccactcgtgtagctgccgtgctcgttggctgggctcaagctggtcgcgccgtctctagcagggcccgcgaccgggcggacctctttgatgccgtcacccgctcattcaccgccctcctctaatctgtctctcgttatcgcctcgttgtgtcacccctagcgtccttctcgcaagatcaatggagatctgctcaatccctgccttctttgagaaggtcctgagtgagtgtcgagcctggccagtctctgcgcgacggagcgaaggcggcccgccgcgagaagacgacgcgccgcacgtctcttccactttttcgtgtgctcgatctgactctcctctcctccacttttgcccgagaggaagggctaaactcgcagctgtgcgcggcgtgggtgaaggggtcgtcaagtgtcataagagagacgcagcaggcgaggcgctctcggcgatcatggtgtcgtgtgcagggatagcggatgggcggaggagtgcgatgcagggggcggaggaaaggacagggtgctgaggtgtcggtcggatcatgcctaaacgcgatgtggaaggctaggcgtcagcatcctctgcctcgatctgtcgcacgacaagagagagacacgcacgagataggtgtacgtcttgaggtcggcctcgcggtcgaggtagtcgcgctcgatcagggcctcgatccgcttcttgatgtcgctcggcgtcggcgcaaagcgcggggcgagctgcttgatgacctcttgcaggaggtcagagtgcttgagacgcttgctgctcttcatgatgcggacgatgcaggcctggcgggaaggagagggaaggacatgggtcagagcgggatgacgagcgctgaatgggcgagagcggccggggccggacctcgatcatgtgccggcggtcttccatgaccttgtcgttcgtctcgatccgctcctcggtcgtctcgacctttgaggcgaccatcgcaatcttgatcttgacgagcggggcggtgaacgcgtcgttgaaggcgaaagtgtcggtcgttgcaacctcgcggcccttggggaacttggtcaggacgcgatacttgccgcacgcgagcgactggagcgtccgtgcgagctcggcgtgcgggatctgggtcgccgcttggatatcctgcagaaggggagaaaggtgggtcaacgagatcgtcaggccgactctgggatcgcggcgccgcacctcgtaaccgagctcctcgccgtcatcgagctcctcaaatagcaggaggacgatgagcgcgagcgtcgagacgttgagctcgtgcgtccgggctgtgaagcgaacgcggacgtcggctgtgccctggcccgtctgccacgtcaaccgccggccgctgtggcgcgagtggtaaaacttttcgaagtgcgtgcaccgctcggcgagcgctggcgggaagctcgcgagctgcttctgcgagacgcccggccagaaggtcgccgtcaggaccgtgacggccagctcaaacggtggctgttgctggagaggtggaggaggagcggcaaggcgtgagcgatgggagaaaggctggaaggccaaggccaaaggtgcgcgcactgaggtctgggcgacgtggttcttgtacatgtccatcgtgtcggtcgagacacggatgtccataaacatgccctcgagcttctgcgtgaattggtagccgcactcgatctggaggcgagcagagacggtcagcaagagagccgcgttgtgtgccgagaacgggaacgcaccttgagcttggcgaccatgccgcgctcggcgtcgtccgagacgctccggccgttgataagccgcttcgagaggtggttcttgtagtagcgctcaaagacgtccttgtcggtcaggaagcggaagagggtgatggtcttgtcaaggacgacgtcgacctcctcctccgacttgcccttgaggcccttcttgaggttgtcgtcgataaagagcgagatgtactcggccgactttggattggcgttgatgaagagctcaaaggcctcgttgatcgaggtctggacccgccggtcctcgccaaagccgccgacgaggagcgcgtcgagcttgtccttgaggtcgagcacctcctgaacccaacggagcgcgatctggagcgcactcgccgcagccgcaccaccgcccgcagcgccctccttggccttgcctttgcccttggcggtggacgctgccgccgtctcgttgccgtctgccggcggcggtgcgtcgaccggaaccatcgcgggggcgagcacagcggcgttgatcttctcgccccggcgtcggacgtcgtccttgaggtgctgccggagctccttgtggccggtcgggacgaggccaaagagcctgtagagccgggcgagatcgtcgacattgtcgccgtcgaccatcggcacgagccccgagccaggcttggtcaggacaatctggagatgggccgtcagcaggtggtcctggagaatcctctggagcgcagccgacgtctggttcgacaggtagtgctgggtacgcgaggcctcctcctcgagccggcgctcggtccggcggaggtagtcgcccgccgtcatgtcctcgacgagccgctcgccctcgtcgcggtagaaggcggccgtccaggcgaggaagccggcctcgaagtcgagctcgtagacgctcggcccgccgggccggtcgctcaggttgagcaggatctgaacaacatcgcggacggccgagcggttgatgacctcgccctcgcgctcgagtcggatctgcgacagcaaggtcgagatgagctggtcgtggatcggctcggccgccgagcggacaatcttgacgagaaagagcgtcaggccggcgtcgtagatgagcggtagcggcggcttctgcgccggcgtccagaccttgtcctgagggtcgagcacctaatgttcagcaagcaatccaagcgggcgcttcgttggcagctaccaagggatgcaccatgtacttgaggacgtcgcggatcttgcccatgcagctgatgtggtcgtcccagacgcccttgactgccttgaggaagcgctcgccctcctggccgcgttcaacggcgctcatgccctcgcctcctccgccaccggcactgctactgctcccaacagcgccaacagcattgaccccggccactgctattgctgctgctgctgctgctgatgcactggcgccggttgcggccgagcagctgctgctgctgctgctgccggcggccatcgtcgtcgtcggcaaagtcggcacgagtggcgcccgcgggaagctcgggacgatgagcgaccgggcgagggtgagcaggtggtccgagattagcaccttgacgccgctgtagagctggtcgccctgtcgtcgggaacgagcgaggcgagctcgggaagcgtcagcacaatcgctcgcaacgaaggggagaggcgccgcgacgaaagccgaactcggaacggacctgcttgtagagcaccatgttgtacgcgtaccggtactgctcctcgtagctgagcttgctcgagttgtgccgttggatctcgcggatggccgccgcgagccgggtccacgtctcgctcaagggcgtctgaagcgtcggctgcaagggacggcaacccggtgagcatgagtggcaacctggagcgcgcgctaagagaagacgcggaccttcatcggcggtctctgtgcgagcggaggggcggcacggcagcaggaacgatcagccatcccttccattgtccagaggcgcggaggcatgtcagacacccgggaacgtacaattttgcccttgggcttcttgagcccgcccgggcctccgagagagtctgccggcaaaaagcaggaggatcagcaatgccgcgatggacaggcatggcggcgagtggcttctgagctggcgagcgaggccggcgggcgaggagctcctccgggccgagtaagatgagcggctatggcctacgcactcatgcttctgaaatcggagatggactggtacgctcgagggtaccgcgtcgacagaggttgagagggctgagacggagggaggtggtgtcgtggttgacggtcgggagcgaggcgaggtcgggtcgaccgtcttgccctcgcacgcgcgactacgcgcagcggccaccgccgtctcgagaaggtggaactggcgcggtactataagtctcccgagaagtcccacttttctaggctttttgctccgagtcccaccaaagagagtttaaatggctttgctttcgtccccattgtcgggactttctgaagggtgcttttcgccccactggcaagactttttatccccccctccaggacctttagtcccctcattcgggcgggtagctagtgtgcatgcacgttcgatccaggcttgctctcgcccctacccctcccctttgaccccccacgacggcggcacgaacggcggcggcggcgggcccgccatttcttttgctccaggcggatgatcaaccggccacctaattcgtcctttctctttttctttgttctcacctttactatccccttcctcgacccccgttgccattaggtaactcgggttccgacgcgcctggtgatgcggaggttagcgaccccgcccggcaaagtcaaagccgttggctcatcaaaggggcagccatcaagctgcccttgagagcgctctccctgtatatcaacctcgccgacttccgctttgaggtcgaccccgtcgctttctcatctgaagccggccgggaggcgcttgtcctctaccatcatgtcggtggcgaaataacgacggctccaccttttccaataggcggaagatgagcccttacgcgggctctgccgtcaaggccgagaaggggtcagcccgtctgccagtcatctgattgccctcggtcgacgccggggtcatggcttgtctcctgtcgaagaaggtttgaggcggcggcccgtacaggattcaattttgacaagttgcacaaggcgcccgccagctcaaaggtgcgagaccaatggcttctgttcgtgctgtatgacaccagacctgacacgtccatgcccatgcagcctgtccccgagcttggcggcgctgtcacggccgaccggtcaaaccaagacccgagctttgtgcgtttctaatccaccgtcaggtctgtctgatgttggtcgggctgcgtctgcctttctccccaagagttcgagcttcgttcaaaatgaaattacacagcgtccaaaggctcacctgacagcggccgaggcgtctgaagggttggttgacctccgttagctgtctgtgttgtgctctcaagttatgctgatgggcctcttgagctgactgagcatttcagcgatggttgtcgacatggtctctacattgtgctcaactgaaccaacatcgcgcccgtcgtcaacgccaggtcggacgctgctatcgaggtcaattcggacgaggaccggctactcggcggcggcaccctgcgcttaaaggtaagggtccggccgtgaagaggccggaacgcgtcaccagatacagaaagcggcaccaacaacctgcttacgctctgaccctgttagtaattgttgatgtgtttgacctcatgcagcatcgcataccgctgttaaatgcaagggtgaggagaccaaggagctaaacaccgccctgctccacctctaccctcacagcaaccgctgcctcaacgacaaagaccgaccgctgcatgacatacgtccatcttgtctgcaacttgcggttgcgctgcttaatcaaagcgatcagaatatcctcgtcgtccagctcgtcctcgtcgcaatcgaacaaaaactgctacaagacgagcaaagctcccaccttcttgattagttcgtttctgccgccatgaaggcaaagagattggagcggacttttcagcagcgaccggtctagttctcagcagtcaatcgcttggactagaggactatatcgaaatcttcctctctctgtcaagcttgcctcgcaaacagtcgacgtctcaccaaacttcaaactcaggcgacgtacaccacggacgacctagtacatacctgaacactgaccgacggatttactgatagcgtaccaggaaccatactggtcgcatactaatagccatcctggtaaataccagtaggcctatcggtatcctaaaatgagcgcatgtaaacagctgtcgcctcagcgcaaactcgcgctgatcaaccctgcagtccgtgcaatttagccaaaataactaatttccgctgccaaaaaaaaacaaaaactgcaagattatctgcgagcttcaaattctgccgctctcaatcgtggcggtcacttgaaggctgcgcgaggcggaataaaatttctgggaaactcaagttcaaggaacgcgcattgtattgggagcacctagtggtaccgttcggttcccttgcctgaaattaaaccagtcattcatgccgtcagttaaagcacatcgtcaacagagcagcatagaattaaggcaactcgagcagcaggaggcccccaactcaacagtcattttagagccggtcttgctttttttcgtacaatttatcgagcactgcgggtccaagagacgtcaaattgcacccgagcgcttcagagatctgatggacagatgatgatcgtacaatcaatcaggcaatgagggcagaacaagaatcctaagctagacgctggaaatgagaaccgcgttgatctagaagccaattgatcttgagaatcagtccttgtaaaacatcaggcgtgattgtttgcctggcgtgtttgcacgctacaccagcaacaaagcgggcccatcggcacctcaaggtctcttattagcatgacgcgtcgcaccaactcagggtaaacactgtgaaagaggcaagacagttcatgatggcaggcagtcaagtcagtctcccaggcagcttgactcaaggtctcactttgtgctaattccaattcagtcccttagcctaccgttgcgccctctttatgcgaaagtcactggccggtgccagcttattgatggactcgtaataccatccccacgctgaaaagatcaggcgagaaaacgtcctgatcgccgaccaatggcaattcgtacttgtagatatgatgttcttggccatagtcagattcattccatttgcattctttgttaccagattgttaccacaaattactgaatatctcaagattgcgagccgcctgttgatctttttccccttctggcaatccccttctggcaaatggcatctaaacataataatcagggtagcccaatgttcatactcatagaggtccaaacgaattcagatgaggcgaagactttgtgagtcttgatgactgcctcaacgacccagcttgtcagcagtcatttttcctcgtgcgaactcatgctttggattgaaattccgatcaacccgatcgatcaaaacatagagtacctcataacccttatggccgttctctgggacagaatgtttgctgtttgttttcaattcctgtctcatggtccgtgtcacagcacacatgtcaggcatatatatacacgatggtggcatatccggcggtagtgcccagggcagcagcaatcatatgatgaatctacagtggtctttcagcgcggtcgcttgaccgctctcgcagttttgaccgacgctacttatttattgtctactatcggcgttgccttgtattttgaacaggagtgctaggcctggccagttttacacccctcagcagtagcacgcttcgaccgacgctctctcacagcgctggcgcgacgactgcgacaccgtctctcgtacgccgcatctctcaattttaacgcgcggtgggcctttgatgtttcgagccgaggatacgatggccaggtgttgttgactgaacactttgcggcgacgcctggcgctggcgccggcaataaggtcttatgaagatgatgagaaacattgagctcaggagctgctgcactggacgaatccccgcccacgccgagaaggtggcggctggagccttgtgcagagacaacaggctttcaaagagctttcatctcggctaaaatgcgcgaaaggaggagtaaaaaaagacagacgtgtgcgtcggcggctgcgaggcgaggtcggtacgcaacgatgagagagggttcgcacctgcaagtcgccaatgacaactgtccggcgcctcgctccatttacgaccgtctgcttaccctctgaggtaaacgaggtgttcacgcgggcggctcatgcagatcacgaggtaggccaacacgcctaaaggcgggccgggccctcattgacccctacagcggtagaggggcgctcgtgttgctgggaatatgatgacagaagatgcttttgtcgcaggcggctgactaggctcgatctggctgccggttccgctagcgagctcgacgctcacggccgggttggggcggatgtaattcccccgagatgagcctgatcagcagcggccgagagccatgatgatctcctcggggtggccgcacgaggcgaagtacgtcgcgccgccggcccaagccaggtggccccgtacttggttcggtcgaagaactggcagaggcgaagttcggattacgcacgcgttagcaggtcgccctccgaagtcaggaaaaggtggggctcttactgttattacttgtcgggcggcttggaacggaggacgagcatctcgaccaggctgggtaccttgtgggtcgtgtgcatgacgagcgtgccagcgaaaagcgggtagggcagccagtactgagcgcgctcgttggcaaaggcgagcaacgaccgcttacaggcgggtctcgagtggaaggtccatccttttgacaggtcggcctaacctttttggccacccgggtgacgagttggacgatcggattggctcagctcggctaaaggagcaggacaaagtgaagggctgaagtgcggagccaaggccaagcactggctctcgtgaggtagacgttggcgacgtcgtctattgcacacccagcgacaacgacacacacagtctgagagaggaggaagcatgagcatgactgatggcattcagcagaaaagggcgcgcggcggcaagcgatatgggcaaagaaaaagaggctgagccgggtggaggaagtagacgccggcacatgcgagcaattcgaacaagttgaggctaaagtcattgcaccccggcacgcgcgttagagtccagccgcgctgccgggtaattcagaaagtcgggccggtgactcgcgtttatcagcgccagcgctgcgcgtccatgattcgcttgttgagccgcattagtgccagcgtcgacagcggttagggtgcatcggaccgagacgtataacgccggtgactgtggcatcagccttgacccgcatctcccggtcgggcttggtgtgaaattcttggccttcttgcgggtaacttgctcgtacatgaggtcagtgtaggtcctaggcgtcagtggcgtgacatcagcccgtcagcggcgaagcacgcgttgttatcagtcgagctgaagcccaatcggctcaggcactcacgatttaaggctctcgcgccatgacggcactgattgatgctcgagccggcgtcgcttctcacgaatatcggtcctgcatagggggagcatcaaaaacggcaatcagcgccgatattcgtctcgatggaagcgacaagctatgcgtgaaaggaacaaacagctgccagccagcagagggtgtcatcaagtagcgtttggccaacagtcggggtagcagccaaagatatgctcagtaccgcgtggaactctgcggtacgagtgttcttaagctaatttagtcccaaacgttcttgtcggctcaaagaaccttctacgccaactgcggctaccaccctcgcttctcggctaccgttcgtgacgtcccggctccagcagcccaggaccatgtcaagcacatcaaggacacacactcattgtgccaggcgtcgatgaagcacgctcacgagtctcaaaagaaatacgccaatcgacggcgctccccagccccagacttcaaagagggacagctcgtcctcctcaaacggaccaacatccggaccgatcggccgagtgacaaacttgaccttaagctcctcggacccttcaagatcctcaggatcgtcggcagctcagcctatcgcctagaccttcccgccacaatgaaggtccacccgacgttccatgtctctctcctagagccctatcacagcaacgaccttccagcccgacggccggcgccgcctccagagcccatcgtcgacgacgatggtgacctacgctatcacgtcaaaaccatcctcaagtcccgtcttcatcaacgcgccttccagtatttcgtccgctgggcacgatacgacgccaattcggactcctagattccgcacaccgagctggacgacgatgacccactcgtcctcgagttccacaccaagcacccgtcggcggcaagtactcccgcgcgtcgccaagccgtccgcgccctcgccttgcagcctcaagtcagctctatcgggctcatggcgtcctgctcgtcccagactcctcgcaacccgcctggacgggagagtactgtcatggttcgactctgccaggaacagcagatccccggctcggggttcgaaccagggcctcagcccgcacgacagaagagaagtcaagcactaccagttccccacccgtcaccggttcgcaatttccatgtggaacctctagtgcgacacccgatcaacaccggccgaatctagacccggcaaccctcggtcgccggtcgttctccggcatcagctctgccggcgtgagtcaccagctccaccgaattagtcagcatctccaccggatcagtcagcaggcacagccttccagaagattcttcgccatcacacttcagcctacttaaacccctgtagacctcgagtcgccacctgaatctcaagcttgcctctttgttccccctctcactcgcccttgcccatcagagctccagcctcccccctgctcgccacttgtcccctaaccgtccgactccagctagctgggtgttgtcgatgatacagcttcccgttcatcagcagctcatgggggaggatagtctttgtaggccaacgtggaccgcaaggactcatttttgaccgtttcttaggcgcgcatcagcgtcgtgctttggccacatcccgggagtcctgtcgaacgcgaccgtgctcctccgcgcgccggtttcgcttgactttgtctttctttcagtcctttgtccgacaggctagccccagagatgatcatagcggagccctctcggtcgagcttccggcgccgggagctgtggggcgctgccgcctcgtcgtctgaaactggcactatcccgacgtggccgaggacagctgccttgcgcttccgggtccgatttcatatgcctttatccacctcgaaaaggctgacagacgcgagcccgacggctgttctgtttctgaacgagcttgtaattgacaacctcatcaattccgcatccaagagcatgggcgtcctcctctcagatcccccctcgacagcgctcttcccgtcgacccagcccccaaggcgcgcaagccagtgcccccgaggacgaggagaccatctcatcgcccatcgacgtcggcccgtctgtcgacgtcgactcgcccgcgcccgaggacagctcgcccgtcgacaaacctaaacgctgctctgcccatcgcgcccgctccctcggccgctctacccgacgcactcgcttcactggcctcgccagactttgttattttcagacaaaggtagccctcaacaaggccgtcgccgaaacgggtgccaggagggagacatcaacgaggttcgattcctgagcactcaaacggagagatctacaccgttgccgagtcaaaagcagcccaccggcgcgtccgggctgccgaacaggacgaattatcgacgagctcctcgctcacgccgcagaacccgctcggcgggtgtttagagtacgcgcttccatctgtggagcggctaatagagtggtaggaatggtgagaagctaatgggcagaggcatgacggaagggagctggttgggccaccatcggtgggctggcgggcgagaggctacaaaggtaggcgccgctgcttcttccctccttccctcccgtccaccacctcgtccttcctctcactctctggctgcctgtccatccccttcttgtctgctcgcctcggccctcctcctcgcgactctctttctagccgcaggctcgctcgatcgtatccactgcgcgactcgtcaatctctccgatcgttctatcaggtgcgcctcgtcttttcgagctcaccttgctcgctggctctcttttcgtcgctcgagctttttggctgacatcgcacccgtctcgatcctcaactggcgcccccccttgcagctcccccgatcaagcagagccgtccgtcgccatgctcggccctggtctcaccttctgcgccggcctcggcttccttgttgcccacgccgccggcgccttcgctgcctataccggaccgacgtgtggcgacatccgcgtcggcacctgccccggggagcccttcccgggctcctcgttcaccggtgtctcgtgctctgcaagtgagtccttgtgtcaatcacgctcacgcgcgtcggcctcccttcctgacctcttcctcttgctgctcttgccagacgtcaacaacgtcaactttgagggacgtgtcaacatcggacaggtcgcctctgcccaagcgtgcgctcaggcttgccgcttcaacgtatgtctcgacgcgtcgtggccgcccgacctgctcctgatctgaccctgcgctcatcgatcgacagtccctcgccatcacccgtgtcgtcgcgggctcggacccaacccgctacacttgcgcctgtgccgacaacggtcagcagtcgaacctcatcctcctcgctcgatcaactccgaggctgacatgtcctccctcttccctccctcagccaacaaccagggcccggtcgactgcaaccccgagcggccgggctatgtcgccatctacttccactcggcagccgctcaggcctcgggcaatagcaagcggcgcctgctggccgagcgtgcccgtcgggcggaggccaagacggcctgcccgcgtggcctgactgcctgcaagatccccggctctgatgacggcttcgaggtgcgccgcaacatgctttctttctctctctttctctcttgcaggcgcctgaagatgacagaccggattcgctcacagtgcctcgacatcatgactgagctcgagtcgtgcggcggctgccgtcacggcgtttaccaaccggcgactcccaacgaccgcattgcctcgcccttgtgagtcgcaccttgtcgatctgcagtcagctcgcgcccaagactgacgacaataactgttgccaccgctagcgacgacgagcagctggttatgccggctgctcctgccggagagcctcgccgcggcgccgagtaagccgagtcccttctcggccgtttgtcaggattttcgctgactatcacctctccccttgtactagttgcaccgaccctactcggtacggcttcggcatcacctgccgtcagggagagtgcctcccctttgcctgaggaggccgacgtccgtctctcgtctcggtaggcagcccgctttcccccctcctcttcttctgaaccctctcggcgatgcctcttttcacttccatataccccaatccctttcgtctttgccttccatgtggtctacacccctaatcggcacctcccgctgtgtcgccgccataccatgacgctcgcttccgtttgaccgctcaacgagggcttcggtttgacgtcgactgtacccagcaaagggagccgatgcgaacagaaatgcatgtgtgattcgggcgcgaaatgtacggagaggcagagcgaacgggaatctcttgggaaggcgagcaaacagacggaggcaggcgagattgcgctccaggagggcgagcgagacatgtgggagaaggggcggccgggaaagcgtgtaagtggagtagaggaggaatttgtgcaggctgagattagcgggaggaaagaaggagttgggacggcgccagggcccacgagagggcggcattggggagagggaggtgtattgtgtgtgtggcgtgtgcgacgagagatgcttggagggaacgaggcggaggccgaacgaagatacaagggggagaagcagcagactgaggaccaagagcgagcgttgtgaagcagagatgagacatgggtggggtttagtgaaagagttggtgacgcgcagctcctctactggccgttgctgaggtcgtgcccgaacgggctgaacgagggcgagttccacgcgccgttgctagcggcggtcgaagacggcacgccccgacgcgacggaggcggactgcggccgagcgaggacgggaaggaagacatctggccggcaggcttggccgaggggaacgcgtcgcccggcggatacgacggtgttccggctggcgacgagtgccgagcctgcgaccggtcttgcgacgccggacgggacggcacagggagaccgctgccggcaacacgctgctgctggctagcgccggtcggcgcgttctgaccaaaggaagccccaaacggtacgggcggccgagcgtggtggcgatggctaccggccgagaccgagccgtccgacaggtcgacattgaacgagtagtcgagagtcggcgagccgatcgtctggtccgtcaggggcgggctgccaatcgagctcgagctgctcgtccacgagctgccgccaggcccgccgttttggacggaggctgtcggcgtgctcgacggcccgcgctggccgagcggatgctttgagaaagagagccggatgccgcccttgacgaggccgttgatcgtgtcgccgtaaagcgccttgagcgtaaccgaagctgcctcgacgtcctcgaactgtgcagacggccagtcctgttgtcagatcgagaactctcggaagcgaagagcacgaagaaagcgagatcgggcgcacctcgacgaagcacatcgggccattggtcttctgccggtagctgaggcggcggaagccgtcgcagcgcgagaagagtgcgcggagagcgtcctcaagctgcgtgttggacgacgacggcgcggacgaagtcggcagattgccgacgtagagcgtgttgatctataacggtgagcggaggaggtagtgaaggcagtcagtgagccacgacgcgctagaaggggcaaaggaggcggtcgaacgcaccggcgggttcatgtcggctgggtttgccgaccgagggaggtgcttgcctccagccgccttgccaaacgatgacgacgcgctgccgctcgcgctacccgggtccgagtcgcgtgcgccgtcgtcgagcggcggccgaagctgaccgttcgagccggcctgggcttgctgctgctgctgctgctgctgctgctgctgctgctgctgctgctgctgctgctgctgagctccgagcgaagggctccgcaggtgggctggcgtgagcgcctgctggccggcgccgagcgcgccaggcgtcagcggcggcgagaacgcggcaagctcgtctgcccgacggaggtccatcattggcggctgggtgagcgaccgggcaaggccaaacgactctggcgagagcgggtaatcgctttccttgccattgcggagactgctgaagtggccgccagagctgctgccggcgctgctggtccctccgccaccggccgagtggagcggcggcgggtggaggaagggcgtgtcgctcggctggccgagcatcggcgactggaggtgactcggcggtgtcgacgagagcgatgaggctgacaggaccggaggtgactcggcgcgcccaatctcgtcttccccgccggctgatggccgatcgggtccgatccagggactcacgttggacgatggctcgcccgacctgctgaccgcaccaaacgtctgcggctgcggcgcgaggccgacagcgacgcccccaccgacgacgctgctagtgctccccgaagcgccggccgcgttgggactgccaccctcatcgccgccgacgccgcggcgcgtgtggagattcttcttcgccatctcggccttgaggacgctcgcccgctcgacgtcgaccttgcggccctggagcgcgtcgcgcgcgtcgagcgccgcctggcgcgttttgaacttggcgaagccgatgctctgccggcggggcgggccggcggctgctgccgccgctgctgctgctgctgccgaaggaccgtttggcgtcgacgatggcggcgcgaggaggaagcctccgaggccaagcgccgaagaggcgggcggcaccgcagcggcaggatcgctgaagtcgtacgacgtcgggtcgaagaacggctgttggccggcgtgctggaggaggagcgacggctcggcaacctggccagccaacttgactcctccaccagcagcgaccgcgcttaacgccgcctgggcgacagcagcggccgtcgctgcgacaagtgggttctgcatgcccggctgctgctgcgtgcccggcgggatggcggctgactgggccggcggcagcttgagtgtcgccgcttcgaagccggcgcagaaggtgaacatgttctgaaattcgcgctcctgccaaacgaagtcgagaagaagaatcagcaggcgaacaggctctaatgtctgtcaggacgacgccacgcacctgcatgtcgtctggaaagccgacgacaaagatcgtgctgatctcctcctccgcctcagcccgacctccagggctgccattcccacccgggccagcaccaccgccactgccaccgccgaggcgcggaaagcggccgttctgtccgagcatggggttgacgcctccgaggccgacgggaagcatgctgagcgcgagcgacgagctgtgcacaggcatgctcgcctggcgggtaggcttctgctgctgctgctgttgttgctgctgctgatgctgaggggtaggcggcggcggctggccgaactgcatcggcggcgcgccgggcgggctgagcatcgggaaggctcccgggccaaacgcgccctgtgacgccgaggagagcggcatgctcgcctgccgcataggctgctgctgctgctgcgacggatgatggttgccatagagagagtcgggaggcaggttgtgctggccggaagggtagtacgccccgcccgctcctggcggcggcggcggcgggtagctctctggctcgccgtactggccgagatggaccgacgtcgttggagagtgggcctcgaactggcttatgggcgggtaggggctccgactggccgaatgcgactgctgctgctgagagtaggggtagccctggccggcaccgactcctgactggagatggcgcccgtagccaccggcgccgtcgtcgagcatccggtcaaagtcggccgagcgcgggccgtcgtacatctgctgctgctgctggtgcggcggtggcccgcgctgatccgaaccttcggcgaagccgctgctgtattggtgctgctgctgctgcgggacgaacggtcggtgctggagatggagtgccgacggagccggctgccggctgtggtggcccatcatcatgctcgagctctgtgggccgccattgctcggcgcgccgtttgatggcgccgccggagaatggaagccagccgaaggtccggcctgctgctgctggggctgggcgccgctgctcccgccgctatcgagcgactcgagcaggccgcgcgagaggaatgcgagcgggtcgtcggctggcgtgggcgccatctccgattatcgaggtgcgagcgattaagaggagcctcctctgccccctgggcgagacgggcgggggtggatggatgcgttgatcggagggcgggcgagctcagaggaggagagagacgaggcgaggagggcgcgagcgacgtgggagagcgacgcgcgcgtgcgtttctcaggcggatgaggcgaccggtggcgcagacggttggcggcggcggctggagacggggactggacgcgatctagagcaaagtgcttggccgggctgggtggatgctgaggctggaagaggaggaggacgaggacgagggcgagacagcgaaaggcgcccgctcgcccgcaacaacggggacgcgcccgcgcccgcgccggaatgcagatgcacaagtcaagagtcgaatctcgcgcggcagcagcgagagcaggaggggcagtccgggcggggcaggctagggagcaaggagaaggccctggagatggtagggcaggtagggacgtacttcggctgctagaccagggcagggcatgcgaggcagcgtggggaggagggctgaggatgactcctcctgcggcagggcgaggtcgagctcgtcgcagtgtcgcccgccgcccagccaaacaggccgtgtgctagaggtcgagcatcgcaggccgccgcaagacctcgctcaggcgttctcgcgggcaatggaggcgcacggtcagtctggtccgtcgtccgacgaggacctttggagtgcgtcggaggtgtgagcgagatggacggtcggcaagcggcggaggaaggcggcgagctggctgccggctgccttcgttgatttcactgccagcagcagcagcgacgtgcgacgtttcagctcgaggcgcaaccttcacgacagcccgtctgtcccgaacgccgacgagagcgacgagcatcttcctcttgcagcaatcgactgctactgtgttcctcccacctgctcacgcaaagtcgtgccttgcgtcacttagccaacttgggcaaattgcacgtcccgcaaccaaatgtgctgcgcgccgtctgccttcgtgcccttgctccttctcctgcttcgctcaggtgcagagatcaagcgctcgtcgagcacttgacatcgagacaaagataggtcgcaaacggagagagagagggctacatgcggacagcccgcgggccgagttctgaggagaaggttgatgaggcggaatcgagaggaatgcgcctcgttaggcgccgacgaagtcgtccgactgaccgcggaaggacgggtcgcggcctgcgaggagaggagggagcaaggagtgggcgagcgccagggtcagcagatgggacgggaagggaacgtcgaagactgatagaaacgcaccgtccgagccaccctctgcaaagagccgaagcgaaagcggagcaggaaaagtgcttagcgtcagtcgtcgattgaataggccgcttgatggcgagaagagcaggcgtcaaaggcacgacaaggcacgcaccgtgaccggcgccagtcgtctgcgacgaactcatctcaaagcccgagctcgcgccgggctggcttccgccgtactcgctcccagccgacgagatgaagccctcgccattcgtcgtcgggtcgtcgaccgcgctgtctgcggccgaggccgtgttgccagcgtcgccccggccgccaaactggccgcccgagccagagttggagccgcccatctggttggcgcgcgaaaaggggtcgccgccgtagccgccctcggacgtgcctggcgcacgatgagcgtcgcatcagcagctgatgtgtcgcacgtgtgcgaggcgatggaggaggcctgatcggaaaggggcgatggggggggagcgcttttgggggacgggggcgcttggaaggtaaaccggggggggggggggggcagaaattgcagatgagagtcagctgggcgggccctgcgtcagataagaggaggcggccgcgccttttcgaacttcatcttgatcggctttgggttccgggcagtgatggcgtcggcaatctcgtggccgatgcggaaggcgtcctcctttgacttgcccggcatgtggatgaagagtgagtccgtgtcgccgtagacaacctgtcaagggaagggggcggtgagccggtgaagagcgcgaggcaagcgtaatgaaacgcacccggctgccccattttgacgtcgagtggatcagcgtaatggcctgtgagttgcaggtgtctcgcaagtcagccggccgcttatcatcaagagcagcagacgcagacttgccttctcgagcgactcgcggccatactggacgatcgcgtcggcgatctggatgtgaggcatccggcccgagaagctcgccgagcagtagccgtatgtgacgttctgaagcgaaggaggagcgcgaggcggccgatcagtcactcggcgcaaaggcaaggtcacagaaagcggtcgacgtaccgcgagcagcttgagagcgagctggcgcgagttgagcgtccgactcaagttctgtggggaaggcagggaacatcaagtcaagactacatcgactccgctcttctggctgcagccgaaccttgtcgttcttccagcccttcatcgcctgcttgatcatgacgcgcgtgtcgagcagctcgcccagcatctttgcgagcaggctcttgcggagcgtcggcttgacaaacatgatgccgttcggcgaaactagccgagttgacgacggttcagcctgcggccggcagagggcaatcagaggaggagaggcagctcactcgtaatgtagtcctggagcgactcgaggtcgccggcctccatcgtgtacgagctgaagccaaagcggtcggtcgggttgccgtccctgtccttgagccggtcggcccggccgaggcaagtcgaaaagcacatgttgtacgcgagcataatcgacgggtaaaggctttgaaagtcaaggacgacgaccgggtccttgtagaaggccgactgaggctccatgatgagagggatgcactctgcgctttgctggccgccaacctcgtccttgctaggcgttaagaagaggagcgactcgggcttgccgatgcgaaacatcatcgactcgaccttgaactgtgagccgcgctgccagacgtctgagaagtcaatgccgtagacgcgagcaaactcgctgcggggtccagatatgagcggcggttagagggagagaagggctcaacttgacgcaaggaatgacttacgcgttgcgcgagatgagctccgagagatcgagtatctcgacaaccatgaggatgcgaccgaagatgtactcgagcgcgcggctcgtctcggacgggacgtttgatgcgtagagctcgaagagggtgtttagcgtgagcttcgggacgctgggtaggtctcgagcgctaggtcagagacggaggaaacggcaggtcgactgaagctcgtttctcgaacgcaccggcggtgaagcaggtggaaggcgacgttctcgaagctgtagtgattgagggtgagctcgcccttgagcatccgccagagattgaagacgtgccggccctcgacctggaagagcgagtggtgctcagcgtcgtagtcggacgcatggcgctggatcggattcttgaacgggctgagctgattaatgaactcttcctgggcgcctggaaggtaagcgagcgacggcgcatcagcaagcggacccgtgacaagcgggaccttggtaggggcgcgcaccttcgtggtaggttgacatccgatgggtgacgtagccccacgaggccgtctggacctcccagccgctgagaatatcagggtcccactcccagactcgctcaatcaggaggttgatcagcgagacctcatcagcgacaatgtctggccggacgttatgcccgagcagccgccgagggtccttggtcgagagctcaggctcgcccccgccggcagcctgggctgggtcgacgaggatcatgccgatgtggcagcccggcaggtagcagttgtcgggcgcctcgccgtcgctctggaacgcgaacagggcgccgatgatggggtcgagttcgggcaccggcagccggccaggtcgcgtctggactggaaagggcgggcgtcgcagcgcgcaggcctcaatcagcgatgaccggcggccgcagcggagcggagacgggacggaccgagaatctcgagcaccatgaccgacatgaagcgcttctcgcggtggcgcgacgcctcgtcgacctggctaaatttgaagccctgcgtgttcttctgggtcgagccggcgtgctgcgactcgagcagatgcttgcgccggcgcttgccctcggacgtgtcggcctcgagccaggcagaagcctcgccgcggctgacggcccggaaaccaaactcccagcgctgcgacgaggcgcttagccgagaaggagcagcgacaggcggaggaccgtcgtcgcttgcctggttaacgagccgcctcttgcgctggagccgaaccgcccggcggtcagcgtcaacctggccgagaaaggtcccctcctgccgggcatagacgtcgtcgaccggctcctcgtcctcctcgcgggcgtgggtcgaaaacgaccaaatgcggccggcgtactcgcgcggcttgggcaggtcgtgcgggtccgagtagtaagggccgcgatggacgccaaaacggtcgtaggccgcgctgctgctcggtagcgaagcaggcaggagcgttggcgggagggcgagctcgaccgagacgtccatcgaggtgttgttgggctctgaagcagtgcgagaagtaggttagccccaaggccctttcgcaaacgactgcgctgagcattctggagacaaacctgcaccggacgacgggtcaagggagctaacgaccgccgccgtcggcactggctgcagctcccgcccgccagcagcctgcgtcggtgccggcgggagagcaaacgaagcgccgggcccgacctgcgcagcaggaatcgccagctcctcgcggctgctcgagagctccctcgtgcgttcgtgccccgccggatcagctgcagactgttcgccgtcgtccgacgcggccgcaatgttcagccggacgcgcttctttggccgcctgtcgggctcgggtgagggagggacgagtgccgatgtcgccgggacgagtgcgcgcggctgatgccgacggacaaggggcgagggccgcgcaagcggcctcgcgacggcgggcgagtgagcagacttcatgacgaggatgtcgctctcgggtgacgaggcccgctcggtcgctccgtcgtcgtcgctgctctcgtccgagccgggcgcggtcgccgtcggcgagacgagcgtcggctcgaaaaggtccgacgggaggccgtcgtcgtcgaacgacgctacgcgtgcgagagagtcgggcggcgagggcgggatgagcgcgtcgacctcgcggagcgacgacggcggcgagatgcgctgggcgaagtggccgtcgtcgttgtcgtcgtccggcgtcggcgagcgcgactgagggaacgtcggcgggacaaatgtcgagagcacaaagtcgggcaggcggtccttcccaaacggcgcaaaggacgagacgggtccgaccgcacgcgctggtctggtgctacttgcggcaggcgagccaaagttcggctgggcaggccgagggccgagggcgaaggccatggccgtcgatggcttgacgggcgacggcgagtcgtcagcggcggctggtgtttcagacttgacgcggccaaacgtccggctcgccgagggcgactcgtccagctcgtcgtcctcatcgtcgtcggcctcatcattgaatcgtctcttgcgcggcgtcgtctcgcgcgcaagctgcgaatatcgcacggtcctgagagtgctcggcgagcgcggactcgtcgtcgtcgttgtcgtcgtcgccattgcgccagcggcggtccgcttgagcggcgacgtccggacggcggagcctggcgagcgcgacttgcgttcggcgcgggtcgagccgggcgagaagtaggccgagaacgggtaggcctgcgcgaccggtgcccgcgagagcgggacgaggacgtttgaggctgctgctgctgctgctgaccgggcctgacgaggcgtcgtcgctgctgctgctgctgctaccgcctcggccgccgcgtccgcaggcttcatccggacgcgtgtccgtccgccgacctgcgtcaggtcgccttcaaagcccgagtcagcaccccacgggtcgactggtctcccgtgaagcgcatccacctcatcctcgtcagcctcgtcgccgtcctcgaacgcgccgccggcgccagcaccggtgcggaacgggtcagcgtccggcgtgccgtcgtcggcctcgggcgggtggaggtagtcgtcctgctcgctctcgacgcgcaggccgcggcgctcttcagcctcgagctgcgaggcgcgctgggtcgcttggaagacaagctgctggtcgacgtcggcctctccgccttcgtcgtcttcgtcatcgtcgtcgaacgatggcttgttgccagccggcgttgaaggcgcagagaacacgttaaacggcccacctaccggacccttcctcggcgtttgcctctcaccaaccgccgccttcgccgccgtcgatcgatcctccagggcgcccacctccgccttcggcaggtgctcgctctggcttggcagcgcctcgcccgcagcggaaggcatgggcgtcctcggccagccgcgcgtcagcgcgcggaacgtcgttgggatgtagggttcccagcaggcgagctcggcgaccgactcgcgccggccagaggcgtgcgtgaggaggtcgtcgagcgtccgtggccggacagttggctcgccatcggtcacagccagcggtccaccctcggcggcagcgacggtcgcagcccgggcgcggagcgtctcgcggtcctgggcgatccgagcgtcgacctctgcccaccagcgaggctccgacccccacccgacgtcccgcccgggcacgtcgtccgccttccccaatctcgcaccatacgacagcttgcccagatcgccctccccgcttgaccctttgcctgccgcgcgccgccgccgccgctcgtcctcccaaagctcctcgagcgagtcaacgagcttccggtcggtccccagtccgccctgagcaagctcgacgaacgcctgatgcaactcgcgagggacaatcgcgagccggttcaggattgcactgacgtggacgtcgagctcgagcgcggtccgcgatgttggcgtgagggttgtcgggtggaggtacgagccgggcgttgaggtcgtcgtccagcgccgaagccgagaggggaggagcatctctgagccgggcgaacgtgcgccgacgccatcgtcgtcgttgggaaccgaccggaagcgcacatcggcgaggtcgagccacccgcagcctccaaggccgaagtcgatcaagaactggagcacaaacccaaggtgtccctcatagaccctcgccttgagctcgagcaccgctccctccgccagcacacgcatcagcttccagcggtcccccggccggacgtacgcaatccttagaaagaagctgtagccgacgcggtagccgtagagctcggtccctttgcaaaggacgatcgagtggagcgcgttggccgtctttgcgaggtggggtgggttcgagggcttgaacggtgggcggagagcaatgttgagcgccgtcccgagccgggtgatgaaccgccggactggcgacgggcgagcgagcgagcagaggggtcagcgtcgtctggcgttctctctgcgtgcacgcgcccagaagggaagcggcctcacccgagtcggggtcgatcgcccggtccttcgggtagtcgatgtacaagtagggataggcgccatggacgttgacgcaggcgcgctacgagagagcaaaagggggtcagcctggcgaagtggggcgaggaggcgggggtgctgcgctttcgattcgagcagaaccttgagccggccggtcggcagccaactccttctgccaaacgaggagaaacgcaaacgacggagcgatggtcaagagagagcaggaacgcacctgcccaccctccgtgacgcccaacaccctgatcacaggcacctcgtggaacgtctttccgtgcgagaagccactcgacagctggtcgacgcccggctcaggtttcgcgagcgagtaggtgacatttgtgagccggacgcggaggagcgggtcgggtatcgagggtggagaggcgattggcggcggcggcagcggcggcgagggcttatacggtcggtcgggcgagcaagcggccggacgacagcacacggacggcctgatcagctctcagtgtctgtcgcggagtcgctgggcgtcgtcgaacgtccgtctgaccgtcgtcgctgctggagagtggctgtcaagggtgcgagtgcgagatgagcgtgggataagcctgcctgctggtctacatcgtgccctgccgtcgcgcattagacgcgtcgacgcgactggccacatctctctcgtcacccgcccgacgacgatgccgcccgccagcaagtctcggacgtacgcccggaatggcccgcttctcaagcggaggtcctcgcccgcgcctcagccatcgtcgtacgtccttctgtcgcgcgcgtgagacgcaaggctgaccggtcgcgctctgcccgcagtccctcgcctcggccagcaaccctctcctcgccctcgtcgtcgacgcgggccctcggcaggtcatcgtcgtccttttctgttccgacacgatcatcttcgccttctcttccgtcggatactgctgctgccgctgcggtagtcctcggcccgtccgtcgcgctcggagcgaacgccctcgtccccgctgctggcgacagcaaggccaagcgccgcccgccaggcccgccgtcgacggtccaaggaacgctcaagggcttcttcagcgcccttccacggcctgagcggaaccgtgcgtcagtactgtcgtcgttgtcgtcggcctcgccctcggtcgaacgtctgcacctcgctgagcggccggcgaaacgcccccggtcgcccggcgccgcgtcctcctcgccctctcactcctccctttcgactcacccgaccaagcgagcctcctcgtcctcagacgccgccgccgctgctccccctccgaccatcttgcaccaactcctcctcgcccccctcccctcgacccttcaaacctgcccaacctgccaaatgaccttcgccccgtcctcgcccgtcgacgccacgcaacacacggctttccaccggacggtcgagcgcgggctggcgtggtttcggccgggagaaactggggcaagtaagggcgagggcgtcgagaacgtcgctggcggcgatgtcgagtgggaggcgggaggaggacgaaggggcacgggccgggtcgtccgcgtgcgtgggattccgccaggcaaagtcggaaagccccctcctccgctccctccgtcgcacagcccgccgactcggacgccgactcggacgacggccgaccccgcccaccaaatgccggccggcacgccgatcggctcgcgcccgagctcgccctcctctgcacgtgcctgatcgccgtcaagctcgtctacttccagcgccggcctgccgataccgccggcggggccaggggatggcgggcgggcgagcggacgagcgaaaggaggcgccgggaggcggcgagagagccgggcgcggcgtggggggctgtcgagggccgctcttcaacctccacctcctcgtccgccgtcgacgcggacggaaacgtcatcgccaactcggatgactccgacgaggacgaggacggccccgaagtaggcgagggcgtcctccctcgctccgattggctcgcgctcgtccgtcggatgctcgacctcgtcctgcataaagtcgaccgccggcgactcgcaagcggcgatttgtccgtccctccttctccctgctgacctcgagagggggcgcgtgaactgacgcacgacttgatgctgctgcttgcgtgggttggttggcgttaaagcgacccgctcgagctcgggccggacgagatggacgcgtacctcgcgctcgcgccggcgttgctcgctgacggccggccgaagccaaagagtgcgtgcacatctcaactctactcatctcgtctcttcgggacgcgagcagaagacttactaagaggattcggcgtgtgctttcgaacagtgttcgatacgctcacggcccttccgctgcctttcgacccgccagcgccggctccaacgttgtcccacccctcagccggtctatcaacgacgccgacttcatccgagtcagcaccgacgacgacgacgacgccggcaaagacgtccccctcagcctcggcagcagcagcagcgctcaccccggccgtctaccgcgcggctgcgcacgcccggtcgaagctcggcaaccccctcccgccttcgttccctccttccgccacctcctcctcctctggcccggtcgacgacgccaaagacgacgccctctcttaccccgtcttcgacccactcgacacatccggcctcctccccccgtcgctcgccgcgctcctcacactcggcgcacgcgcgatcgggttctcggacgagagcgtggggtatgcgctcgggacgctcgagcggaggcttgtgcgaaaggaggaggaggcgaggcgggcgaggaggcgcgaacgggcggagggcgagggcggagagggggtcgaaggtaaggctgcgagtgacgagatggacgtcgagggctgagatttgggccttccgactgcgcgtgatctcgatgcccgactttcgcttggagcccaaattgacctctgaccgagaacgacgtctgctttcaccggcatgctgttgagcggaggcgtgccatggatagtcctgcagacgcccgggaggtacaaggatgtgaaggacgggcgagggtggggccgagggtagccaaaagtgcgagcggtcgaggacagtatacaagggtggcggaggaagagaagcagagaaagcggagagtgagccgatcaggcctgcttggccgaggtcggcggggcctcctcgtggtgctcgaagctgccctcgaggtccttctccttggccgagaggtggtggaggccggcctcgcggtccgccgtctggcgggcaacgtacgcgtcgcgttcctcctgggtcgtcgcaccgaatacaatatccatggcctccaaagacagaccggaggtctcggggagccagaagccgaagcaggccgataggacgttcactgagggaggcaggcagaggtgtcgcggtcgtcaatcgctgatcgacgagaggagaatactcgccgcgctctactcactcgcggcgaagaagaagaagatcttgccgttcggcatagcgttgatgagatagagcgtgatctgcaacagggcgctcggatgtcagctgttgcggacggagggcaaggcagagtgagagtgcgagcgcaccttggtcaggacaaagttgaagcaccactgggtcgaggtcgcgattgacatgccgtaaggacggaggcgcatcgggaagatctcggcgctgtgcggacggaggggagattgaggtgtcagccggcggagcaaggtgacggctgaggcgaggggactgaccagtagacccaagggaccgggccccacgagaagcagtaagggatgacgaagaggtagatcatggccgccatcgcgatcgaagaaggagcgatctctgcggccttgaggtcgggcggatgggtgctgaagatggcgccgatgatccaaaggaagagcgacatgccgagggcgccaaagcccagagcccacttgcggccgatcttttcaatgccgagaaagatgaagcacgaggtggcgacgatcttgacaatgccgtagatgcctgaggacaggagaccagtcgagacgccggtgataccgatcgacttgaagatggtcggagcctatgcgcgaggaaagggagggtagtcagcgactgggccggtgcgcaagagagccaagacgagacgcacatagtagttgatcgagttctggccggaccactgctggaggaagaagatcgcaaaggcgatgaacatgcggatccggttgccgggcttgagggcgagcgaccagctggcgccagtcatgttctccttctcctcctggattgcggcgcagatctcgttgaattcctcgacgacgaccgggtcgtcaatgttgcgcttccgggtccaggccaggttcgcaagggcctcgtcgatccggccgcggtacgcgagccagcgaggcgactcgcgcatgaagggcaggaggaggagcataaggccgcctgcgaagaatggtgacgatcagactttctgaccggcgcgagaggtggcggtgagcaagaggacgcacaagggaccagctggaatgcgatcgggatccgccattgggcggacgactccttcatcgagacattgatgccgtactcgatccagtacctgcaggaggtcatggtcaggtcagccggcttggcctctggcgcaggcaggcaaggagcacagggcacgcacgaaaaggcgacaccaatgacgacgacgatttggaacatgccggtgatacggccgcggacctccttgggcgtcatctccgagacgtaggtcgggcagacgttggacatgatgccgacgccgaagccacaaacgacccggccggcgatcatcgggccgagattggtcatggcgcacgtcgacatgatgccgccggcgagaaagatgaagcacgagaggaccatcgtgtacttgcggccaaacttctgcatgaagtaggcggcggtcaaggcgccaaagaaggcgccgacgtgcaggagcgagacaacgttggagccgttgtcggccttggtctttgcgtcggcgttgtagtagccaaagtccttctggaaggcgaccatcgagatgacgccgccgccgacaccagtgtcgtctagagaatgcaagtgagggtcaggaggccggccgtggacgagatgactggcataagagaggacaggacgaacagccaaagaggaaaatgcccatgtaggcaatgatcgcgagcaagtacgcccggctgttctgcatgcgcgtgctggccccggtctggtagacctgggtgtcaggcttgttgctccggtcaaagatgcccatcttggccgatcgagcgagacgaggaggggggtctgcgcaggcagataaagcaagctgtccggtcagcatccggcagaggcagtgggctggagctcgaggaggtgaggtcgacttacgagggcagaggggcggaggcagaagccagagggtccggtcgacgtgtgcgaggcggtcctcggtggcgagtgtcgaggctgctgcgaaggaagagggaagaggccggtgaagagagacctagcagctcaggctttgagcctcctccttttagctggcctcgtccggcctgttctccgtcgttccggaggctgccgtcgtcgtccgggccactctacgagccgacgcgactcaggtcctcgaccggctgggcctctcgctgctgagcgggccttcggctgcgcccgcccaccgctcctgcgagcctactggccccgcaaccctctgctggatggtgcagcgtgagccgggcgcagtcgtggtacgacgcccgacgtgtgtccttgacggtgcgacctagacgggcgcacatcgaccgtcgagcctctgctgaattctgtcagcctcgccttgtctggccagagaaccgtgagcgaggacgggagcgcagtcagctcgggagacctgtcagggatcggcagcaaggcgggcgggcgcgttggccggccggcggtcgagtcgaggtcgtgcgtcggggaggaggaggacaggaatagccttgctggccgcaacgctggcgagaagtgcaagtgcgagtcagccctactcttccgcccggcccggcgccggcccggacaacgatcgagtaacgcagcagccccagctttggcttgtccgcggtgcgaaggaagaaacgatggccaccggtcgtcgggaagagtcgtcgtggcgttcgagagactccaggattgtgcgggcaaggagcaagcgacgaagcgtggcggtcgcaggggcaattgcagcggcggaagtgcggtcgtcaagcgagcacgaccgacggcttgcggcgagcgggcccgacagtcagcgcacctaaagctcgacgccaacacataagttgacaagccgagcaacgactgcagaccgaaaaggcgagggcgagcggtgagatcagctgcgatcattagcggtcgagaagagggcgagaaggaagaggtttgcactggcccgctccgtcttgcagagcgagcccggctattgtaaaagaggcgcatgcgatggggggttggggctggcaaagcggccgatacaaagggagatcgtgtgagggcgcaggatgtcactcgttaagaaaggaggaggcggagggtagatgcaagaacgggggggaagaccaggaggaaagaggctaagtaggagggtactgtacagcgcgagagggcaggagaggaggaagcgcagaggccggacgaaggaagtcctaggcggcggcccggttggcagggacggccggctcgacgtgctcgttgtgctcgtactcgccctcgaggtccttctccttggccgagagcgggtcggcccgcttgtgggccagctcggcaatgtgggcgtcgcgctcctccctggtgacggcaccaaaaactacgtccatgtcctcttttgacacgaaacaaagggaattttgtcagtcgacaagcacagctcgcatcgagaaggcgcgagactcaccgagtgaaacgccggaggtctcggggacccaaaagccgaaggcggccgagaggaggttggtgcaggcgaagagaataaagaccttgccgccggggaggccgatgatgaggtaaggcgtgagcttggtgaggacaaagttgaagcaccactgggtggcggcggcggtcgacattccgtagtgacggatgcgcatcgggaagatctcggcgctgcgagaaggaagagcagaagaaagagcaggaggaaaggtcagcgcaaacaaagacgagagggcgacaaaggaaagaggacgcaccagtagacccaagggacgggaccccacgagaagcagtaagggatgacgaagaggtagatcatagcggccatggccatcgacgacggaggaggggtcgcgccctcgggcaggttcttgttgaccgggtgggtgatgaagatggcggcgatgatccaaaggaagagcgacatgccgagggcgccaaagcccagagcccacttgcggccgatccgctcaatgccgaggaagatgaaggcggcggtcgcgacaatcttgacgatgccgtagatgccggacgagaggaggccgacgctcgtgccggtcaggccgatcgaagcaaagacctcgggggcctagagaaaagaggcaagcaggcgtcagtggtgagcgagcgcgaggtgaaagcgaagcggagatggccgacgcacgtagtagttaatcgagttctggccggaccactgctggaggaagaaaacgccgaaggcgatgaacatgcggatccggttgccgggcttggccgtgtccttccacgaggagcccgaggtgttggccttctcctcctcgatggcggcgcagatctcgttgaactcatcgacgacgtaggggtcgtcgatgttgcgcttgcggacccaggcaaggttggcgagggcctcgtccagacggcccttgtcggcgagccaacggggcgactccttgatgagcgggaggaggacgagcatgatgcctgccgagaggagacgggaggtcgagctcggtcagcataagactcaggagagcagcgcgaagtattggcaagaaggaagacgcaccacaggggaccagctggaaagcgatcgggatccgccatgaggccgaggtctggacggggcgggagacgttgatggcgtaggtgatccagtacgagaaggcaacgccgacgacgacgacaatctgaaacatgccggtgatacggccgcggacctccttgggcgtcatctctgagacgtaggtcgggcagacgaccgacatgataccgacgccgaagccgcagacgacgcgaccggcgatcatcgggccgaggttgtgcgtcgccgccgtcgacataacaccgccgatgaggaagatgaagcagccgataaagagaccccacttgcggccggtccgggcgacgatgggggcggcaccgagcgcaccaaagaaggcgccgacgtgcaggagcgagacaacgttcgagttgttgtcggcaatgaccttcgggctggcgttggcgtagccgaagtcctgcttgaagatcttgagcgagacgacgccgccgcccacaccggtgtcgtctgtcaaagggaagggggaaaggagagtcagcgcctgcgctcaggagcgaaacgagcctaaggaaggccgggcgagcactcacagccgaagaggaagatgcccatgtaggcaattaaggcgagcaggtaggcccgcgagttctgggagcgcgagtgcgccccagtctggtagacctgggtgtcgggcttcgagctgaacatgctgctgagtcccatctcgagcaagaggcggcctgcatggcgaaacgtcggaggcccccggtcagccctttgaagcttgcgatgcgcagtcgaatgatgagttgcgaggcacgcaccgattcggctttagggaaggagtgcttgaggaggaggatgtggagggcgagctataagcggcctcgagaggtgcgtccgaggcggggaggcagagagaagggtgggggatgaggtgtgagagaggactgcggcgccgagctctcgttttaactacaggtgcgagccggctcgtggccggcgcggcccggaccgtcaccggatagtggctgcacggggccagttggcgtgcactgccaagcgttgttctcgatccggggaagccggcgggcgatctgctctttgaggcacgagcctcagttacgcctgctcgctcgctctgcccccgtctgggaaaacctgtcagccctcccgcggcccgacgagcccttgccgcgacaccttcaacagcaccccagcgcacgcgctctttgactcaggcagcagcggccattctatcggtcgtgcttgccctggttgatcttgcgcttcttgacctttttgggcatcttggtcttgcgcttctcggccgcctcctccttggccgcctttttgcgcgccttcttgacgtcgcggtcctcgttccggtggccccgaagtggcttgggcggcttgtcgccgccctcagcgtccgtgtcgcccccgctgccgctctcgtcgtcgtcgtcgtcgtcgtcgtcgttcgagcctgagccagatgccgagccagctgcctcgtcaatcgcatcgccgacgccgacgatgccgacgccgccggtccggacgtactcgagtgcggtgccctcgccccggttgacagcctcgacgtcgcgctccgggtcgtacacctcggcgagcgagcgcgggatgtaggtcgacttgaagatgaggtcgtcctgcgcgtcgtcgaggtcgcgcatgtcggtcggcagcgcggccgagaagtgaggcgcccggcgcgacttgttagcgtgcttgccgccaccgttgctgctgctgctgttgctgccggcagcggcactcgatgaggccttcgaggtcgaggctgtcggctgagccggagtgatggcagtcgacttgaattcctcgacgagctcgacctcgccctcctcgacggcgtcggcctcctcggcgtcatcctcctcgtagtcctcctgcgcgccgccggcagaggcctcaagccactcgccgaggcaccgctcccactcgacgtcctcccagcgccgcttctcggcctcgcgtgtagcctcgtcctcggccgccgcggcactcggctcgaacttggcctcgccaactgagccccaggttacgtactcgaatgctcgccgaaggccaagcacgcggaccgagccggacgagcacttgcggaagaaggcggcgatgttggtcaggtcggaccggaggaagtcgtatgcgtgcgggtggtcgtgctcgaccgactgcgagacgtcgatgatgaacatgtgctggagatgccagctgcgcatgccgagaaagggtgtgggggtcaacatcggacgagacacagaagtggaagacggcgcacaggatgttgtactcgctcaggtcggcgtggacgagccggcagacctggtacatcttgcggagagcaaccatgcactcggcgtacatctcctgcttctcgggcagcgacatgtgcttctcagcatccttcagccggagcgagggcctgcagggcgagcagaagcaattccgtcggtcaaagccatcctcgagcgctctagttgaaacgcgtgggcacgcaccagccgtcggtgtcgccaaggaattccatcgccagcacgttctcgcgcacctcgagcgagcgggggcagcgtataccggccgcctcgagccgcttcaagttgcgcatctccttctcggcccacactggcagcgggacgatcaaaatcagtaacgagtcgagcctaagtcaagcaggaggcgggcgacgcactgcggaccatcttacgcgggttcttgctctggccgcccttgaagcgaaattcgcccgtgatgtacttttcccggtctttgaagacgaggatactcgtcttgaagatcttgagcgcgatctgctttggcagctctggcgggttggggttgtgcgccgtcgggaccggcggcgtcgccggcggccaggcgtgatagacgtttgcctccttgccggtcgaaacgcagccctcgaccttgccgacgagcccgcggttgatcatcttgagtaggacgagccgcgtccgagagtcgagtacctgctcgaccgtcgcccggtccgacttgtccttctggttctgccggtcagccgccgccttcgtattgatcgacggctgcggcgtgtagggtgcgaggttgatgagccgcgagagacgcgtctcttgctgtgcggtcgtcgaggtcgagcctccagccgcggcttgacttgacgacgacgaagcagaggtggccgccggcgctggccgcgagcggttaatggctggtagcggcgtcgaccggatggaggacgacgagtgcttcttgagctgaccgccggttgaggaggagccggcgtacgacgagaccgacggggcagagacagccgactggtactgctttagacgattgtactgctttgagaagtctgcacgggcgagacgagggcaaggcagtcagcgtcagcgtcctcgtcaggtggaggtcgaccagcggctgcgagacgcacccttctcgtgcccgccccagtcctcgtcctcgacagcgccgagctgagcccattcctcatcctcctcatcctggttccagtcatcctctgcctcatccccctcattttctgcattgacggcaaacgcctcctcgaccggctcagcaccggctcccgagaggggtggcggagcggtcggcgccgtgtcgtcgtcctctgcgtcagcaaaggcgtcggcgtcgtggatgtaggccggtgtgttgggcgctgcgtactctggccgactgctaggcgcggacgacatagctgtacgtggatgcgagggcgacgaggactggtggtgagaggacagcaagaggcaggcgtcagtgggtcggcctgcgcggaattctgcctccgacaggctcggaggcaatcaggcgagccgactgcgcccagcccgaacctctcgccctcgccttcccgacctccgcctcgtcctccagccctcagccctctctctacagcatgtctggcgtgtcgggcatctccaaggcgctcctgctcaaatcgccggcgacccgaccctcagccgtcctcccgcgcttcccgtgccctcccctccacctcggctcgccctcgaccgacctcatacactcgacgctcgcctcgcctctgccggccggcttcctcatcctcccacgcttctttgactggggcgagcagcaggtccttctgtcggccgcacttgagcggctcgaacgtttaggcggcgttcggcgacgagcggacggcgctaagcggcggagtacgaaggctgagctccaggcgaggcgcgatcagctccagggccaggggcaaggcctcgagggctggtttcgcgacgagtcagagtatgctttccagacggtgcgtagcgggcgtcgccagctgtggcctctgagcagaccgactgacctctgccctctcacctcctgcacttcccccccatcgcgtcggtagggccacatggactcagtgacgcatcactaccgcgaggcggccatctcgtcgccaatacctcctgccggctcccatcctgccttctcaccaacgccgtccgatcttttggcccggctcaacttcctctttcctttacctccaaagtcggccgaatctggcgacagcgatccgcaaccggcaggcccgcgcatccaaacgcacctcctgcacctcgcccagctcggatggatcgggccgcacgtcgacaataaggagtcgatgggcaacgtcctcgtcggcgtctgtctcggcggcgagcgcgtgctgcggcttgagcgggcggggatggaaggggaggagaagacggtcgacggccgggtcgacattctgctcgagagcgggaccgtctacgtccagaggttcgtgtttgctgcgagcgcgccgttcttttcaagatagagacggctgacacgcttgcgtcgatcagtgatgaggtccgcaacgactttgagcactcgatcctcccgccgccagagtcgcccgactatccggcagacgacccgccggcatggacagtcgcgccacggcagcgtatgtcgatcatcctgcgcgacctgcctccgtcaacggccgtcgtgcgtgtctctcactcttggccggccgatgagcgccttcgctgaccgtgctctggctctcgactccccgccagtccaacatcacgacggacccgctctcgccagcgttctacaacccgctcggcgactcgctcccgctcgcatacgaccccctttcggccgctgacgagctctacctgacgctcccgccaaagatggccgcacgtctccagcgcgaaaacgaggacgcgctcgattcggttcgcgagcagtactatgttccgtcatcgaagcaagaggcgagctatgcacgccggacgcgtgacggggcgacgctctcaggccacgagcgcatcaaggctggcatgcggaaccgcaagtggggcggcaagtgaaagggggtcgccggacgagcgacagaccgcgtcagattattgccatggcccctctgcctctcttgtcgggcgaaggatgtgcggccggaaaggaatgtcgaagctgttacccttttcccgccttcggggccgttggtcctcgcggggttgcgagagacggcctccgccggccgtcgacgacgcacggggctcagccctggaggccatatcgaaagagcggcaacgagctttcggacagacgacgcccctcgacctgttgcttttgccacgaatgctcatcccgcccttcctcctcagccttttcgcccaactctcggcaagcctcatgagtgtccctgcccaggccgaccggcacgaccacgcgtcttacgcggcgccctcgctcgtccagagcgagcaccttcacctcgagtggaccgtcaactgggctgagcagaccatctcgggctcggtccggcacacgatgctcgtcaaggagaccatcgagcaggtcgtcctcgacgtccgcgacctctccgtcagcaaggttgtcgtcggcgagaccgagatcaaggtgcgtctttggcttgcgtcgctggccagctctctcggagctaaccgtcaacctccttccactctcctatcgctagggctggaccgtcggcgagcggcacgaggtgctcggctcggccctgacgatcccgctcggctcccaggcggccgagggcgacaagctcaacatcaccgtctcgtacgcgacgagtccgtcatcgtcggccctcggctggctcgctgctgagtacgtggcccttccttccctctcgtcgccttccttccctgtcgtggcgctctttccctctccgtcggctgttttctagcaccagcagctgatactgaattgtgcattccgtcgctttgcaggcagacaaagggcggcaagcacccctacctatactcgcaatcgcaggcaatccacggccggtccctcatcccctcgcaagacacgcctggcgtcaaagcgacctacacggccaccatcaactcgaccctgccggtactcatgtcggcccgccgggtctcacctgctccttcggccgaacacgaggtcggcaagtcggtcgtctacacctaccagcaggacgtcgctattccgtcttaccttgttgccatcgcctcgggcaaccttgctcaccgggcattcactgagcctgagggcaagagctggcgtactggcacctggacggaggtccgtcggcagccttgagcttgaacgagctcacgatagtagtcgctgacgccgtctttcatccatcctctctggcagcccgaggcgctcgacgccgttcactgggagttctcggctgacacgaacaagtacgtcggacgcgctgatcccctctcggccccaggcggctgacagaactctgcgcttctcaggttcatcgaagtcgccgaggacatcaccggctacagctacgagaagtggggcacctacgacatcctcctcctcccgccgagctttccctacggaggcatggaggtggaccccctgcgctctgacgattggcacagcaagatgactgacacggacgctggcccgccagaacgcctgcttgaccttcgccacaccaactcttatcgccggcgaccgcaggtggggcaaaaacgcgaagcagccctggcctgactagcagctgacaactcctttggctgccgtccgcatcagtcttgtcgacgtcgtcgcgcacgaaatcagccacagctggttcggcaaccttgtcggtgcgttcctacggctgcgccgcgccgaaggctggccacagcatctgagtgaacccctgcgcgcttggcaggctgcgcgacgtggtctcacttctggcttaatgagagctggacggtacgtggaggcttcacttccactctgctagcatcaactgacctgtcttcgagccggcttacagacgtacctcgagcggttgctcatgcgcgccgtgcacggcgagggtgcgcgcggcctctcgttcacgatcggccgcaaggccatgaaggactcgatgcgcgagttcaaagagcagggcaatgagcgctacatgcggctcgtcgttccttaccaggctggcgaggatcccgagtgcgtgcctctgaccggaacgccgcttgcccgtccctggcgctgacctacgttcgaccctgcagcgatgccttctcgtccatcccctacagtccgtcctgatcgccggccttcgtcgttaaaaaatgtgctgacattgccttgcttcgacagacggtggctcaaacctgcttctccacctcggtctgtgctgccgtactttcctctcgatcggcagctccactgacgctcgccctctttcgccgctccacagagcagacgctcggcggccttgaggctttcacgccctacatccaatcttacgtttccacttttgccggccagtcgatcaccacgcagcagtggctcgaccacctctacaccttctggcgcgatgccggtggcgaggcagccgtcaagaagctcgacagcgtcgactttaatgcttggctccacggcgaggcgctcgacatcccggtcgacgtcaagtacgacacctcgctcgtcgaccaggtgcgctccctcctccgtcggcgctcgtggcccgtcttgaatgccgcccgaccaaaagctaactctgtgttctgtgtaataacccttttccaggcttacgagctggccgttgcctggaccgaggcttcaaaggcctcgtccttcggccggttcaaaaagtccgacctcactccgctcatcaccgaccagatcgtcgtcttcctcgagaagctcgaggtcgaccgcgccctcagcgtcgaggcggtcaaggcgatggacgaagtctacagcctgtcgacggccggcaatgccgagctcagctggcgcttcttccaggtgcgtcccttcaaagcgatcaggccgagaagacacgcgctcacgagctcactcccctgcagatcgcgctcggcaccggacccgcgtacgccgagcaggctgccgcctgggtgacggacaagggccgcatgaagtttgcccggacgacccaccatctatcccaccctccctctgccgccggctcaacacacgcgactcgggaggatgtcgccgcctcaacagcagcagcagcagtcggtcccgccggccgccctctcgcacgcgctcatcatccaggctgtcggtcgctcggtcgacggcgcagacaccctcgacctctcgcgccagcacgtcggccaagtgacggacgacgccgtcaatgagctcgccaacgtcgggcgcgagggaaggggcgtccgccggtcagtgttctctgtctatgtgcttggcgcgcctcgaccttcaacccggtgcccatcactcggggatctcctctcgctcgccagctgctgatcgacgagctcggccccgatccctcccaggctcgccctctcgcacaacctcctctcgagcttacctgcctcgtttggccagctccaccgcctgcgctacctcaacctcaagggaaaccggctccggtcgatcccgctcgcgctgacctcgctcccgtcgctcgagatcctcgacctctcgaagaacgcactcgacagcctccctctccagcccggctcgctcgtcagcctccgggtgctctcgctctcgcacaatgctctcaggacgctcccgggctacctcgccgactttctcgaactcaaggtctgcaagctcgaacacaacccgctcgtctggccgccgccgcgggtcctcggccggatcggcgacgacggccgcgagatggatgaacgtgagtggatccgcgacgtccgcgactttctgaggcgcgagcccgagccgccggcgtatagtccgcgggcggaggacgacgacgatgacgacgatgctgccggcagcgggagcggctcgagctcgggcggcgaggaaccgcgacggcaacgtctccagcagcagcagcagcagtcgcgcccgaccaagcacgcctaccgcggtcctgaatcagccggaccgccaacgacgacgctgacggacgacgatcgccggcggctccggcgcgccggcgcggtcgggccgacgtacgccgttcactcgcgggacaacagcgagttgagcgatctacgcggggcgagctcgccgcttgccgacgagggtggactcgggggcagcagccccgtcggtcatgctggtggtggaggagagctttatcgaccacagcagcccttcacgctgccaccgacgtacgactcaaccggtgcctcctcagccgccggcgtctcggccgggctcgagcgcgccggctcgtcgctgacggcggccggcccgcatcctgctccgtcatggacgtttcccaaacctccctcggtggtcgcgggcaacggcgacaggcctgacgccggcaagctccctgacctcgggcctgtcgctctcgagcggtcggtcgtcaacggcgatgcacagggtgtgccaggcagcagtcccggcggcggcgacccctccgactcggataagggcgaccagagccccctctcgccgccaccgcccttgcaacctacgcttcagcagacgacgccgcacgcccaattctcaaccttctccttgtcagctccgagcctgaccaagagggccttccctccgtcctcggccacgccgacgccagcgcacgcctccgcccttccttcttccaggccagcagcgagcgaaggcgacgcctccttgcctacaccttctgttgaacccagtggcgcccagccatcagaccaagccgaagcgcggccctccccaccagccccagctccggcgggcccgacaagcaacctttatggcgtctcgccgaggcagaactcgaccgacgtcctctcgtcggcccgggggtccttcgcccgctcgtccatctcgagtgccggcggcggaggcggccacgcccggcatcactcgcaccaccagatgagcgcgctcggcagcctcggagccgatggtagcggcgggctaggcggtggcgggagcggcagcgggagcggtggcagtgggatcggccatccgcaccatcggcagcagtacgagcagcagcatgcgctgcagcaggcgcagcttcatgcgggcgttggcgttccgcgactcgggagcaaggcttctgctgggtcgatccatcgcttggctttcccctcgagcggcggtggcgccggaggaggaccggtcttctcgcgcacggcggccgcagcggccatctcgggcgggtcgccgttgaacgacgcgaacgctgccgctcgttcgggagggacgaccggcgccagcggcggtcagggcgcaaccgagtcgtcgactttgccggcggccggcggccagctgatcgagggctcgcgggactcgtacttccggcgcttgtcgaccctcccgccgtcgacaatccccgcctcgatgcctcccgcgctcttgacgctcatcgacggcgcccgggggctcctcttcgcccttgcccagatccaagcgacgctccgccgtcatccaacctcgccgctcgatgaccgcttcgccggcgtcctctcgcgcgtccttgctccggccgcaggcgcgacagacggcctgatcaatgccctcgaccggttcgacagcacgtcacgccgtgccagctcgccgccggcccgcgtcgtccggggcgtcgtcgaggctgtcaaggccaacgtcggcgcgtacggcaaagtcattgcggtcctcatcatccagctcaaggtctcgtcctcaaagctggcgaacaacgtctcctttgtcgcaggcggcggcagcggtcggcccttgacgccaggcggcggctcgctccagcagcagcgcgagaactttgaagacatccgtttcacgcggacgctcctcctcaacctttacggcgcgatgggcgaggtctcgcacgcctggcagacgatgctacccgttctgccggcagtcgcgccgcttctccgcgatccgaacgcaccgccccggcagccgctcgcgacaccatcacaagccaatggatcggcttcgaccggaagcacgggcggaacgtcccaaccgccgcaacctggtggccggcagacgcgactcctctcatcagcgagcgctcggggcgggcaaccgatgagtcccgtcccggagcggctcgaaggctcgggcgcctcggtcagcacgatgacgccagggacgctcgatggcctcagcccggggacgttgcccgccccgtcacgccataagcggggcgcttcgtctggagggggcggcaccggcgggagcgacggctttgcgagagagcaggccgctgcgtcttgcgcgacggccgcggcgagtagccaggccgacagtaatgccggcggtggtttccaccggccctcgcattcgcggacccattcgcagaagattcagcgcgacgtccagcagcaccgcgaggctcaagcactcgctcgccagcagcaacagcaggccgacgtcaacagccgtcggttgggaggccagacgggcgacgagcccggcgccccgagcagtcctgaagcgcctgaccttgcgggccagctactcgaggaggccgtccagactggcttcgccgtttggaatctgatggagaccgacctccagtggcctagcgtgcgtcggcctttcttctcgggccttcctctgctgctgcttctgacttttcgctctccttcgcgtagagctcggtcgacgccaaccactcgccgtcgccgctgtccatcgcccctggctcggcggccatctccaagccgatcgccgatctccttgccgtcatcgccctcgccaaagcccacacgcgccagctccacgagacgatgcgcgcgacagctggcggcagctcctcggcggccgacgagcagactctcgtcgagcatgcgaccgtcttcttccagagcgtcagaaaggttgccagcacgacgcgtgctgtttttgagagcgagcggcgcgagtttcggcgtgacctcaaggtcgggctcggcaagctcacgaggttgacgatggagaggtgcgtctcgcctggccgtcagcgatcagggcgtctttgagtactgacgacctgcccgttcgtcgcacacccgcccgccagtgcgaccctgctacacgtctcgaacctcaagcggcccgggacggctatgtcggcttacacatacggctccgaggaacccccaccggccaacggactctacccctatccgccaccgacgccctcagtcgtctttgcgacgccatacgcaacgccgccgccggcccaacagagcacagggacgggcatgcggccgctcaacctcggccgatcgcgctcggccctcggcggcgatgctgggcccttcgcgacgcccttgcgcgccaccgacacgaacgggcagctgccgctgtcgacgccgaggcctgggccgactgctttcgtacccggccacggaggccggggcaaaggatctaaccggtcgatcggcggcggcccgggtcagggcagctttggaggcagcggtggtggcgggcgcagccaggagggcattcccttctgaatagagctgcgcatggatggatcttccgcctaaacgagccttgtcgctgacccctgctctcgtctgacgacgctgaccccgtgctgactcgagcaacgcagcatcggtcgggagacgagaactcgctgctcaggcgagagcgagcttcttggcctgccgctggatccagagcgtcttaagcgcgtcgtcgcggagcgagaggaacacctcggccgcctggccgtcggcgtgaaagaggtcgacgaggtcgagtaggacttctggcgcgagcttgctgccggtcagtcgctggagggtgcggatcgccgtcgtgctgatcgagcggtcgtcggccggcaaatcgggcaaggccagcgacgaggttgaggctggttcgctggtggaggaggcttcgaccgcgctgcttgtcgcaaccgccggcagcacggacgtctctggtccgcggtcgtcgggcgtcagaacgaccggcgacgattcctgtgagagggcaaggaacgggttgtagaacaccggccggccgaccgaagagtcggacgatgagcggcgccggcggcgcttgcgcgactcggccggcagagtgccggcgctcgctgtagcgggagacgccggcgcagaggctgacgactgaccgtcggcgtcagactgcacgctgacgacgggggaaaagcggaacgagtgcaggccgtcctcatcgtcgtcggtgcgccggtcgtcgcgcgaggtctggacgccgccaccggccgcggcaaagtgctttgcgacgaggagggcgacgtcgccgttccagccggcggccgagaggatgtcgacccagcgcgagttggccgccttggccgagatgccctcggccttgatccagccgtcacggatgtgcttagcccgggcgcgctgcgagtcgttcaggcgcgtcttgtgggcgtttgggtggacagccgtcggttcgacaggccgggtcgaggtcgatgagccggcctgctcggccaggaggctcgcgatggccgccatggggaggtcgtccgacgaccgaggcttcttggccgacggtttggggggctgcgggagaaggcgcggtcagacgggcgtcatctccgagaagcgctgatgtgctgaccttgagcgctggcgactgctcatccgtcccgtccttgcgcaggctgaaggccgagtcgaaggtcgtctgtctacgcgctaccttggccggtctgaccggcagaatcacgggcatcgactgtgtggcctcggcacgggctcgccgcttcgagaggggctcctttgggacgacaggagtcggtcgggtaacggcgacgacacctgggcgagggtcgagcgagtcgtcgtcgtcggcattgctggagtgactgcccagccgaaggtcgaccagccgactgtcgacagacgacgtcgtcgaccgtgcaggcccttcggcggcgagcgagagaaacttggtcttcttgccgatgggagggccgagcgcgagcggattgccttgctctttggcccgaccctccttacgagcgggcggtagaggagggtggctgatggtgccggttcggaacggcggcgttgatgaggccttcgtcttggcgttgaacgtgcctggcggtcgtcgaagcggcgagggatgtgggtcgatcagcattaggcgagagggtgcgaccgacgagaaacgtactcgaccctcgactgactcgtgatcccgagctcgagacttcaggccttccctttgacgtccgctcatagtagacgtcggaagtagagccgtcacgaggcatggctgacagagaaggaggctgcgaggcaagtcggcgagggtcgaggtgatggccgacgagcagagcaaggacggtgctgacgagggtcagtgtcagcaggtagcagggtcggcttgcgagagggtcagcccgcatcttccgggagagaggtcggagggtcggagtcgggcgccgagactgtcgaccggcgcatacagggaagactgtcggccggaactcgctcggcgcacagtcgacgcctaacggacgtgctcgagcagtcaatcttcgaagacgacgaagagacgacaaaagcaagggctcatcgcaaaggaggcgggcatggagagcagacgaaatcaaagagggcggcaagactaaaagaggggcatgagggaaggacgcagatcgcagagcaagatgctcgagggaaggttggcgcaaggcgacagagccgagcgacagaggagcggctggtcgtctaaacgtcgaccgactcctcgttcttcgattgtgtcttcttgtggcccttgcccttggggagcagctcgggtctggtggaagcgagagggcagcgacgacgtgacgtgcgacgcaacaaaggtcgaggcgtcagccactggccaccatcgaatgaggagcagagcacgcgggtcggcgcagacgtacgcaatgttgggcaggacgccgccctggctaatgatcgcatcaccgagaagcttgctgagctcctcgtcgttgcggaccgcgagctgaatgtgacgcggaatgatccgccgcttgcggttgtcgcgggccgcattgccggcgagctcgaggatctcagctacgaggtctgcagaagagacaaagagcgaacgcaagtcagcatctgagctcgtcggcgaagagaggagagcacggccacctcgggttggtcaggacatacactcaagcacggccgcaaggtagacgggcgcgccctggccgattctcgacgcgtagttgcccttcttcaggtggcggtggacacgggagaccggaaactagcagcaagagggcataggagggacgagtcagcgagagagcgagcggctgaagggtcgggccgctggcgacccctgagtgacgacgcacctgcaggccagcccggaccgccttggacgtgtaggtgcgctcgctatcggcacgcggggccttgcccttgccgccctttccggttgacatctggctcattgcttgttttgatgccgagggcgggtgagcgagtgggcgagatgatggcgagagagagaggggtgcgttagttgaccaggcccctttccgaatcacccctccctctccctccctccgcctcgtcggtctctggcgcgtgtgcgaaagccagttgttgaaaaaggagctttgtgaaggagggagggagacatgagcgtcacctctccgggcttggcgagagggcgggcgcctggccgccagctgcgcattcgctcgtcgcttctctccgggccatctcttgtcgcttccctctcttcctctccaaacgccctacccgccctgccttctgcccatcttctcagtcgtgtaaacgcgaaaatggcagccatcaacccgaacacgcctcctgtggcagcacgcaacccgaaagccctctcgctcaaagccctcttcccgacggttccgtccccttcctccctctcgagccgtgcgtcggtagctcgtctgcctcgctgacgaccctccctccttcgacactgcccttctgccccgcccgacccttgtcgctcgcctccgggtcactcgtctgcaggtcgacctctccgtcatcgagtccgtcctcgaagcccacggcggctccgaggaccgagcggtcgagagcctccttgggatgacggacgaggcgtttgagccagagctaagggacacgcacctggccgacaacacggtgcgttctccgtctttcttcccctctcgtcttgagcctgggctgacacgctcttgtcggtgaaaaagcaggcagaaagcgacgcaagctacgcccgggcgctcgcgcttgaggaagaagagcagcacgccgcggctgcggaggcggtcgccgcgcgatacggcgccgctcgctctagccatccgcagcagcagcagcggggggagagggaggaggcggcggcggcgtttgacccgaggaatatcccgtatcagccgagggtccggcggggccagcagcagcagcagcagcagtacagcgcgggcggcggcggcggaggctaccagccccaggccgactacggtgccacaggccccttcttcacccagcaacagcagcctcaaggccccgggctcgaagagcagttccagaagctcgccgtctcgggcaagcggacgttcgagggcttcatggcgagcggcttcgtcaaggggctcaaggacaaggtggccgggtacgtttccttcgccaagcgcgccgctctgtcgacccggggttggggctgatggcttctcctttgttcgtaccttgctgctttagcgtccagggagggatgacgggcgcgcctccgcccgccagcagcagcgacagcagccgccaacacgacccgtactacgtcccggccgattccgatccgacgttcaccagctcgggccggccgtcgacgccctctcgctcaggctcgggctcgggctcggcaggcgcttatgcgcggccgccgcagacgcagaacccggactttcccgcctcggactgggcgatcccgggcgacgataggccggcgtcgcggtcgagtgcgttcttcgttgcatcggggcctgggcacacagacggggccgttcgacttcgctgacgttctgcgctctctctttctcattcttgtcttttcgcctcatggcagactcgaccatccaagcccagatcaacgtcggccccccgacgccactggcgacctcgccccctgctcacaacccgctctggtcctcgtcggcgcccgcgaagcgatccgacgagctcctgcggcatgcccagacgggtgggcgacagagcccgtcaagcagcatgttggggacgtcgccgacgggcgggctcagcagctcacccgggagcagcaagattgactttggtccgtgtcgcccttcttcttcttctccttcggtcctttcggctcctagagcctgccaaacacggttgctgacgacgacgactgagaaatgatgtctctgaacgacccaaaaagccaagctcggcctcctcccgcgccagaagatctcgctcgacggccggccgggctcaccctcaaccctctcaacctcgccttcgactaaacccggcctcgccggaccggccgccacaggcgacccagcggcggcggcgatgatcgcggcggcagcagggccaaacgtcccgccaagcgtcgtccggaagattgagcagccgccggcgaagaagccgggcgcgctcgagagcgacgacgacgacgacgatctcggctacacgaagtcgccttttgacgactgagagaaggagaggccaggatggatgcccacgtgacgatttgcttggcgctgacgctcaaagacaacatcgaccactgacacaaacaacagggacagagagagggaaggggaacgagacggaaaaggggaagggcgggtcacaggacgagcgggccgccccaggtcgggacgaaaatctcgtcgtcgacgcgctgcttgcagtgtcgaaaggcggcccaccacttgcggccgggcgacgacgagaccccgtcgccaacttcctcctcctcctcgccgcgctcggccgcccagcgcacttcgagctcatgctcaagccagcgaaggacgccgatcgcgcgcgccttcgagccatggccgtttgcgcgaagcgagcgggcgacaaagtcggcgagcatgcgcacgcctcgctcgtccgggcccgaggccgcctcgagcgcgatccacgccgagagatcgtctcgaagcgtgttgagcggttggccggcggcgagcgaggccgcggggaacttcttgcgcgagccgagaatcggaggcggcgcgtaggggcctacagcggtggtggagggtttcgacgctagcgagcggtccggtgagcgagtggcactccgcgagcgcccgccgccgccgccgcccgctcggttgtcagtcggactgttgacggcgagcaggtcggcccgcttgccccccttgccgaggtcgggcgtcgtgtttgccgtttttggcaggcgcttgcgctgctctcgaccgtcagcgacaacctgccggagatcctcgcgagggagaccgcggagaaaggcgaggtcccagccaaggaggtccgcgagctcgaccgtctcggcgtcgagagcaccaccctcggccgacccgattgacgtcttggacgagccggcccgtttcggcgacggccgcgagggtccggtggcggcgttggtctgaaagagaccgatgccggccttcatcggcgactggcggttcggacgaagctgcttcgtgatgtgagagacgttgggcatgggcctcttgcgcatcggcgagccgtcagcgccagtcgtgcccatcccatcaggccgaggcggcgtccggccggtcgaggcaggtgagtccacttcgacagctggtggcctgcgaaagtcgggccacgtctcgcggacgaccgacgagggaagagcgtcgaggatctctcttgggacctgcgagatgttggggacgtacggcgtgccgggcggcggtggcggcttccgaacggggacgtgcgacatgccgcgcatcggtccatcctcggcgaccggagccgtcgcgtccagcacgatgacgtccggtgcaggagagggcgagcgcgtgacggtcgctggtatcaccgttgttaccgccgcctggggtgcggcaggctttgcagcgaacgtcagcgccgtctggccggcttcacgcggcttggcgaggggcagtcggcgctcgagcttcgtcaccatctgaggattcaagaataaccaggtcagacgacgagtcacgcaaggaaagaggagacccgctctcgccgcctggatgtaccatgccgatgccccgaagttcttcgggcgggagattcatcgccttgagcaggctgacggccaccttgccgagcacatcagggtcgtcggtcggcccgccccgagggccaaagagctcctttgaccggttgacgtcgttgcagacgccgtggcccataaatttgggcgcctcgactggcgcaccgtcggcgcggaccatgaccttgagcgtcagggccttgccgagccggtcgatcgaccgcatccgtttcgagacctcggccgcgagaccgaccaggaaatcgtcggcctcggcttgcgccttgaagcggatgccatactgcccagccgagcggatggagcagctgtgtcagttccaggagcaaagccgggaccctgacgcggaaggtgagggcgacgaacgttgacctcggcgctgacactcttgcgctccgactcggcaatcacgcgcttgctgtcgatgccccggagtgcgtcgtgcagcgtctggccgttcttcggcccgaggacgtcctgcagctggccgacccgcttgacgacgagctcaccgacgcgcgtcgtcttgaaggccgtcgcaatcttgtcgcgcgtgttgctgccgatgccccagatgtctttgacgtcgagcgggtcgaggaacgcccggacgtcgggctcgacgaggtggaagctgccggccggcttggcccgccgcgtcgcaagccgggcgagcaggatgttggagccaatgccgatcgacatctcgcagcgagtcgcctcccggacgtcatcccggatgcgctcggcgagcacccgcgcccagtcatcggttgcttgcgccccgccagcggcctcggcttcgagctcggcgacgcggtgcgtgacgtcgagcaaagcctcgtcaatcgagactgcctgaaggatgtcagcgtatgcgagtaagatcgtgtacgtcgtcagactgtacgatgagccggcggaaagttagtcacccagatagagaggggacgaagcgggatggacacggacgcagtcatcttgtaagcctgaaagtcgtacggcacggcctggacctccttgcagagcttgcgtgcatggccgaggctgatcaagcagggacgtgtcaatctcaagagaggtctgatcgaccgcgagggatgagtcgaggcgcacctcatgccggccttgatgccgaaggctctggcctcgtagctcgcgctcgcaatctcgctcgtgctcgagccgtccacaactgctgaaccaggtcccgtctgaccgccagccggcgtgccggtcgagtggcagacgacgacgggccggccgacgagctcgggccgacgcttgagcgagacggcgacgaagaaggcgtcaaagtcgcagtgcaggatgatcggcgaccgattggtgctggcgccgcccggaggaggtcgcggaccaccggcgtgagctgaacgggcgagtcggtgcgaggcgagcgagaggtcggagtcggccgtcgtcactcgatgcgtccccttgccgtcgccaagcaccgcaggctgcgaggagcccggagcgagagccgctgagccacccgaagagatgtcctcctgcgcccgtgcgacgatcagcttgagttcagccttccacgtgctgaggtggtgcaagctgcgaggaaggagaaggtcagcgcagtaaggcatagctgaggctatcttcggggacgcaccgcgaattctgataatagccttcgagaaagccctcattgacggccgtgtgacgctcgcgccagccgtcgtcggcccccatcagccgcttggcctgcgcgttctcacctgccatccagtagcccttcttcgcgctcagcgtcgcggcttcggatccgggccgagggtagatgggcgccgccatcgtcgatgaagagactgctgccgatgtgagtgtcggttcggaggccgtcgttgacgagctggccgcgacggctgcaagaagggcagagggcatccgaccgaccgaggcggccagaaaaggagcggccggcggctccgtcgtagagggagggctgacaagcttggcagcatccgtttccttgaccagattgtcggacgggtcagggattgcagccgtctccaggccatcagccgcatcagcccgcttgctcgaaaccttcgcagcggcctctgcctccctctccgcgagcgccaggagccgcttcgagctccgactcgggccgagcgcgaccggcactgcgaccgtcagctggaccgctgccctcttctgtcggccggtgggtgagggagacgaggctttgcgcttcgttggccgggtcggcggaggaggcgacggagcgtccatgatgaggagctcgccctcgtcgtcgtcaccatcgccgtcgatagtagtgccagtcggaggctgcggaagagcacgctcgacccgctgctgcgtctgctgctggacctggcatcctcgttggccggcaaaggcctccacaagcgttcggcttggagcgaccggcgcgaggtgttctgccctcggctgcccggccgcggctatcggcgaagccaacggcgctctagagccaacctcgagcgtcggcaacggcgagtcaagcactccctcggccgcaaacgcttctcctgcggtaccggccggataggacgccagtggggttgaagcgctcacactagccgacgaggacgacgccgctcccgggtcaactgagcccggcgtccagcggtaggtcgaccaggataagagccggccggcacggaccgagtcgacgatccacgccggccatacgaccttgagctggcggtactctttcatctttgccggcgtcaggttggttgcgatgacgtgggtgacgaagccgccgctcttccgatcgaggtactgctcgaccctgccgccgtgggcgaggaacatggctcgcagctcggacggcgcggggtcggtgaagccgttgatgtagatcgtcttgtggttgaagatgagagagcggccgctcggggcagcagcagtggagctggaagccgctgcattcgttgcgagctcggcattctggatctgactgaggaagtggaggagaggagtgggtcatcagcttgtcggtcattgaactagatagcccacccgctttgccgaggctcctccccgggctggaaggaggagagggacgaacagcttcgagcgcttgttccggagatagtcgccgatgccaccaaacgtgttggccgcgtacgtccgcttgagcagagcagcctcccgctcggccgccgtcgactcgcgcaggacgaccgtcggcgttggcgttggcaccgttggcaggtgagagcgcgagccgtcgtgcggggcggcagaggcagagctcgaggtcggcgcccttgccgttgctgctcgcctggttgaggaggaaccgcgggtgacagaatagcggtcggacggtaggcctctcatcctgggctcagacgtgagctcctaggactcgaggatggaagcgggacgtggcaggcggcggtggcaggacgttggttgagtgcggcggtggaagccgggaagaggagtcgcgtcgcccgccggcgagaacccgcctggacttgctggatccctcgagcaagaacgagcgcctggagcctttcaagtgctttgatgcgagaaggggtcgatgtcgtaaggagagggcgatgccgtcgaagggacgaggtcgacgacaagggggaaggacgggcgtcggctcgcgcgctcgggtcgactgcgccctgcctggatggccctgcagcacctgctgctgctctcgtctccccgctgggacgagaggcgggaacggcaagaccgaggacgagcggtcggcgctgccgctcgggagggccgccgggggggcaagcgcgctcgagatggccgctgcggtgtggaacgccgcgtcgagcaggcgggccggcgcactttggctctccgcgtccggcaaaggcgagacgtacaggacctctgcgaggtgtgtcgagagcagcgcccggtatcgctcgagcgcgagccgatgcagcttgtccgacgccccttcgaccgggggaacaggcaggcgttcgagcgcgcacgcgatgaacgctagcgcagcctcttgcgtctcacgcgcgagagggagcgtggtgggctgcgactggctggccgagagggaggcgacgagcgagaggagtgcgcggagccgggccggggggagcgtctcgggccgtttggaggcgaggaggccggcgacggaggacgtcgtggtgtcggacgtcgggtcgccgaggttgactgctggccgatgggcaggagatgaccagagagacgaccaccagcccctcagcgggtcagacgctgccggtgcttgcctcgcagcaagcgccgcatcgtccgacggcggctggaagcccgtgacgcgctcgatgccccacctgagccaagcgtcggccgtctttggatcgccgttcaccctcgccaggtcgccgacgcgtctcgccagctgaacctcgagcgtctctgcgcccttgaagccgttgacggcccgcaggacgcgctcaaagagcgtctgggcgcgcccgagcgcgtcctcggtcgcgagctgctcgagcacgctcgcatgccgaaagaggagcgcgatcccgaccgtgtcctgtggccggtcgatccgcggtcgatgcagcgcagccggcgggagcggcaggtcgtcacgctcgagcgccggcgggagccagacggtcgacgacctgtctgcgagcgtctcttcgatcgctgcgcggacataggcctctgcgatagccgtcgaggggagaagcgcgagctgggcctgtccctccgtcactagcccgctgagcatcggatccgacccaaagaatgcgcggagccggctcagcagagggcgctcgtcgggcggcaaggcggcctcacgctcggcctcggcgagctgcttctggaggtcggcctcggtcgagccgagcggccagaagagggcaaaccacgccatgtggagcatccgccgggcctcaagcgggagggccgacgacgtcccgccggagaggccgccggtccagtcgtcgttctcgagcgcccaaccagcggcgtcgtccgcgccggcggcgtcttcccagagtgtcgctggcgctgccatcccgaccttttcgcaaaagccgaaaaagccggcccagacgctcgtcgcaaacgcgagcgcggcaaagaagaccttgacccagcgctggaggtcgcgcttgagctcaaacgcagtgatggcccggtggccgtcgaggaacgtcgggaggacgatctcctggtgcggccctcgcgagagcgtcagcggccggtcgtaacggctccggaggcggtcgacgagcgatggtcctgctgctgctgctgaaaacgggttggcaagcgctgactcggcctcgttaggaccaggggcgagggctgtcgttgacgatgtcgacgtcgacgcggtggcagaggcggtcggcttggcggaggcttcctgttgcgccggctccggctcgtactcgagcgtcgtcgtcgacggggcgacgctcttaggctggcgcgagacctgtggctggggcgttgctgccggcggcggcaggcgagacgagcggtgccgatggaaaggagcgacgaccgcagcggcggcggcagcggcggtactgctggcagacacccgtggctgctgctgccggagcgccgaccggccggcggacgagagccggtgcatgagagcgctgcgtctgggctctgcagggcgagtcgagtaaggcaagagaggtgatggttgcgaggagggcgagaggagttgaggcgcggtcgaggcgcgtcgccggccggagtttgcactacgcatcgagggtgcacttgcgcactcctttcgacgacggcaatctctcggccggacgacggcaccccggttgagacaaaggggcccaaagttcttcgcaagtttcgccttatatgcgtgcaattgacggggtggtctctctctctggttcttgtcgcgcttccctctccctcccgtgcgcacatcctcctttggagccaggcccacctcacccacctactccaacccataacacgccagggaatgcaaagggatgtcatgctagacgacaccgcctatcagaaaggagaaagagggaggttccaacagccgagcgccctgcgcagaagcggccgccgtgccagccctggtccaaaatccggcaaaatccctccccgctccacggggagaattttgacagtttcccttgaggcacgtcttagtagacgaagccaaggagctttccaccgacgtgcttgcgacgggcctcctcgtggtccatgatgccggccgaggtcgtaaggatgatgaggccgaacgaacgggcggggaggaggaggttgacccacgactcgatctcgtcgacctggacgttgaaccggggcgagatgacgccagtcttgttgagccggccgttgagctggatgacaatcttgccggcgcggtggtcgtcgacaatctcgaactctccgatgtagcctggaagccagcacgggaaaggagaaggtcaatctgggcgctcggagaagccaaaaggacaaaaacgttggagccggtgccgccagactgagaggggagggtgacgagggaagaggcgagaaagggggagaaacggagagagaaaggaggaggaagtggttgtctcggaccgcgacccagtatccctgcgactgaggcagagtggaacggaggaagccctgagcggaaagggcagaagccaggaacgagaagaagcctgccatcgcgcccgaaggtagcgggccgactccctccgaaatcccgacctctcctctcgcgcaccagagccgacccgaggtcgttcccctcgaggaggtgccgagggagggcgaaagccgcgagtaagagtaatgaaggttcgttctgtcgaaaccttaaagaaaggagccagtggggacagatggctgattccaaacagttatggcttcgaggggcggttgctggagagcgggaagggctggcggcgggccggcagacgaaaggggccgggaaaaggaaatcgggacggaccgtgctgctgcatgaccgacaggaagcggacgacgaccttcgacgaaggccggatgaggacctgcagaggagagcaagggacgacgtcagcaaggcgctcgaggtggtagaggccgacgtgctgtccctcgtcaggtcgtcgggcggcaagctcgagctcgtaaggcttgctctgacctaacagacgggacgacgacgagtagcagtcgaggactgacctgccgctttccgcgccgctcggcgttgacgatgttgttgaggcaatcgttaaggacagagacacgcatcttgaaggagtttggccggaggagtaagggctagaagaggaagaggggaggagttcgcgtcgaaatcggtgcgccgggagggacgtcgaagactggaggcaagcggagcacggggttcagccctcgctccctaattcaacgccggagctcgttcgagcgcgccgagcgagcgagcgatcattgcagcaatggcgtcctggcctgtgctgctgccaatgtgtcaactcacagaggcgaggggctggaagggacttgggaagtagttcggcggatcagagcatgcgagcgagtcgggccgcgtcgtcttgccctggccggctgcgcgcgcccctggcccgaagccagcagcgcgggcggccctgctgtcactctctctctcttccggacaatctcccatgtaaatcttcgtcttactctcaggaccgcccacttattctgaatgcatgctgctgtcctcgacgtactcaatgcttgatgtcgtgtttcatccttccgtttcccgtctcgaaccggccctcatgtgaagcaatttcacgcccataattagtccaaatatcgcgccgaccactgggttcctaactcgcctctgcggagaggcctccgacccctccggactgtcttggctcctgctccgcttctacaccgtcttcaagcacattcacgtacgtccccagagaggaagagatgatggaagacggaggatggcatgctgacagtccgctttctttgctcctgcctcctcactgttctcctgcatcctaaacctttgatcttgcccgactggtgcctcggtcgctcgctcttggcctcgcctccgatcgacccctcgtccgaacgctgctgttgatcaccggctgttgctgctcgacgacttgcgcgcacgcctgcctgcctggtctcaatcgtctgcggctgctgctgctgctgctgccgtcgtctgcgcgcttgccctgccgccgctgccttgctgcgtgctccactcactggccgcgctccggctcgaccccaaccaccatccaccaccacaactctatccctcctctttacccgacacagaatgggaaaggttcacggatccctcgcgcgtgccggtaaggtcaagtcgcagtgcccgaaggtgcgtcccagcccgtcctatgatgcgggcctcggaggagggagctcggatgcacgcgcttgcgagcggagtggggctggctgggtgcccgtccaccagcacgccctgggctcgtcttcacctccgagcgcccgtcccgcgcatttcaggcgacagccctctgaccccccatgctgccctctgtccgtccgctgtccgccgttcgctttgtctccttgtctacctcgcctgctctcgttccgcacacgcgcccgggatgacaccaggtcgagaaggccgagaagcccaagacgcccaagggtcgcgctaagaagcgtcttttgtacaaccggcggttcgtcaacgtcacgctcggcccgtctggcaagcgcaagatgaacgagcaggtgcgtcagctgcggtccccgccttgaccttctcctcccttcctcttcgccgctgaccatcgacccattcgaccttgttcgaacttcagccggccggcaagagcggctaaagctattcaaacgctccgtctctgtctcctcgcgggcgcgcgctttctttgaccgaacccttgcggattctgtcgaagtccagccgcactcttcatcatgcaccttcacgaagacaaacttattcggcgggctagttggacgggtcggggggggcacgggctgcacggtgcgacgagggagggagagctcagcaagggggggcaggtcggattgggtggaggaggctagagcagggagggagccgggtgcgtcaagcatgagagcaaggggagggaaccctcgacgagcttgggctgtcggacgcctgtgtttgcatgtcagggtggtctggcgtcaggcttgaggtcgcgcagtgctctgtcaggcggtcgcgtattgctcagattcctccatccagacctgcctgtatcaacttgctgcaccggtccagtcagtcgtgacgattttgcctggacaaagctggatctcctcggtgtctgcgagtcacggacactcgaccgatccttcgcagtcaggcgtcaaaggggaagcaacccgtgagcgtcccgctctgccgccgagcgcgcgacgatttccgccacggcgtcacgttctcctcgcggccaccaccccctcatcgaggcagtgcgctcaaggccaacccgcctcggatcggccaagacagaatgagaaaccaatcgaatcacgtcgcgcgaccacacctcaccctcatcgcacctcttcctacaccctgacctccttcgccccgctcaagcgccttagaggaagaaagcgagcccggcggccgagaggaccgagatgccgacggtgatccagccggtcgtcgttacctgcttgaccgagaggactgcaaaaggataagggttcggtcagttccttgtgcgctcatctcacggtctcgattccgactagcgctcagccgacccgccgctacgctcaacccttgcatcgactcgcactcgagcgcgcgagcgagcggccaaacaacgccgctggctttgagccggaccgtcgctcaacatcggcgcgatggcatcgccgccgcccgcttttctgcatgccgtatggctcgaccacatgccaggcgcaggaccgcgctcggaaaagcttctcgtgccccttccagcacagggcaagacgacggacggctacctcaccctgcccagttgagaagtgaatgagaagccagactcacagtatccgacgtcccaaagcaggtgccggatgccattgaacgagtgaagcgtgaacggcagggcggcggtgaacttgagcgacgtcttgagccacgagggaagctctgagcattggtgatgaggggggaatgaggtcagtcaggggacgggacagttgggcgggcaggagatcgaggtcggtgatggtgggcggaggcggaggctaagtagcggcagccgacgctcgcacactcgccccggcaagtgagcaacggacggtcctctcgcacgactaaaagcgagcatgttgtcgcccgctcgcggcgcaagccaatcggagggcagtcgagcagcctccttcaatggtcggctgctcgcagagcttcgacgcccacccgcccgcccacctcggaccgaatacaagggaatagaggagagtggacgcacgcgaaacgagctcaacgaggtgagcggcgtcgatcgccgggtagaccgggtgggcaaggtaggccatgaagccgacgtacatgccgacgctgaggccgacgcccgtcacgcggttcgcgatcgacagcagccacgtgatctggggctggtagatggtgaagtgaggggacgacggccgggcgaggcgctggctgttgagaagcgaggcattgtcggcgaccgagaggtgctcgacggccggggcggccttcggagtcgaaggcgaaggcgacggccgaggaggcgtcgtgaggagcgacctgcgagcgcgggagagggagacccgtcagctcctcttcccttagcctcgctcgacgtgcacaagaggcgcaatggctaagaccaaccgaaagaggagcggcgcaagcggcgaaagctctgcaacgggaagggttagagacggggatgaagcaagaaggcggtcagctctacgagcccgctcccattcgctgacggctggcacgcgagatattccgctcgtccgcccggctgtcttcgcccggggaagaagaggggaccaactgcagtgcttgaacgactgagcgacagcccggcggccgacgagcgaaacagcaagcatagctagattagagagagggggttgcggagggggggaggaaggaggtgacggtaggcgcgccggacgttttcaggctcgagggcgaaagacgggaacaagagaagaaggtcggccgggctgagcgctcgcgggcgtgacccgccctcccccgaagctccgtcgtctctctctctcggccggcggtcgtgggcctcgtgaaggtcaaggacaagaggcgctggccgtaagctatcgccaccgcagctattcatctttgagtgagaacctgccacgtcttaaacaggtcgtcaaagtagcatgcagagcaactagagctatactgcgtcctgttgggtcaagatgtcagccagaagtgtcagccgatctgccgcaaggggacgactgtcttgatctgatacgcacctcaaaccggaggcgcggtacgacgttcatggcgagcagctgcgattgagagatccaaccgacgagggtcagcggggtgtagacagagcagagctgcgagatgccgggcgcacctcctggaagagcagcttagccgcgtagggaagcgtgatcttgatgacattcttcgagctgtgacagaatgtgcaccatctgtgtggcaatgaaggagagcgtcagctctaagctagggccacgacgagcagagagaagcgcacccgttgtagcccatgagaccacactcctggcacgcgtccgtctcgaaagagtcagacgagatcatgagccgctcgagcatgagctgcgtcgcgccgtaaccgaccaggctgaggagagacgaggcacgaagcggtggtaagcattcgctctgacctgcaggaaagagcagcagcggccacgcaccagtcgcgctccatctctccgagtcgcagacctccatctcgactccgaccctcggtcggctggcgggtgagcgtcgcgcgcggtcctctgttcgatagcaagaagaaggaggtcagcgcgaggtcgaatcaagtgatcgatccgcgtagccaacgcacctcggccgggcgtgcatcttgtccatgaccatgtgctgcgagggagagcaacgatgccgttcgtcagccagcaagctctcaggcagagtcaagggatgagcaaatctcgcaccttgagcttctgatagtagatcggaccgaagaagacgtaggcctcgagcggttggccggtgatgccgctcgtcagcatgtccttgccagcatagccaaagccgctctcgatcaggatctgctgcatgtcggtgaccttggagccgccgaaggccgtctgggaaaggaagaaggcagcgagagcgtcagcaaggaagacatggcatcgacgaccggaagagcgcggcggcgcgacgcacgccgtactgcagcctgtaaggttgaacttggtcagcgacgaggatcagaggtggagaggtagcgaccagcggccgactcactgcccggaaatgacgcccgccttgccggcgagaagctcgatcatcttgccgaccgtcctgcaggaggtgagaggtagtcgaagacatcagcagcggcacgcattgtcggaggtgcaaagcgcgacgcacattcgggaggggaaaccgtgcgggttcatgatgacgtccgctgcagggcgagacggaggtgcggatcatcagctgaaggtcagataacgcggccgggtacaaggattcgacagggagacgcacggcagatgccctggtcgttgaacggcatgtcctcctgcgggacgatcaggccgcagacgcccttctggccgtgccgcgacgaaaacttgtcgccgagctcgggccgccgcgtctgccggatgaggaccttgatgagcagctggtcgctctcgctatcggtaagcatgaccttgtcgatgtagccggcgatcggcgccttgtacgatagcggcgcattcttgaacgacgactggacggccgacgtccccgggttgaagctgttgtcgttggcgttggtcggcgtctgcttgttgatgtagacgtcgccggggtcaacgcgctcgcccgagccggcgatgccgtcgttctggagaatgtcgtaccgcttctgaggaatgttggtgccctcctccatcggtgtgtcggcgatccggtcgtacctgcgtagagcctcgggtgtcagcgccgacagaggcaagccggggcgacaggacgcacgttccgttcggatacttgcggatcatcgtcacattcttgcggaagacctggcagcgtccgtagccgcggtcgaccgaggcctgcgagcaagcggtagcgagaaaagcggtcagcagcggcgacatcaaggtagcagagcgtgccacgccgggcgtaccttgttgaggatgagggcgtcctcgatatcgtagcccgagaaggacatgacggcgacagtcgcattttggccggccggcagcttgtcgtagccaatgagctcgatcgtcttggtcttgaccatcggctgctgcggatagaccatcaggtagagaagtgtgtcgatccggttgagctggttgtaggcgatggcgccgatcgcctgcttgcccatcgcacactggtacgtgttgcgcggcgactggttgtggtgcggatacgggattagaccggcgacggcaccgaggatcgtaaagggctcgatctcgaggtgggtcgtccccgggacgatcatgtgctcgtaaagggcgatgagcgagtcgttctcttcgttgcagtcgagatactcgatcaggccttcggtcaagaagtcgtcaaacgtcatctcgcccgccttgagcagctgtcgtcgggccgaggagggcagccgtcagccatcgttcgcgcgaggagagaacaacagcggcagccgacgaacctgtacgtgccggaccgtcacccgcggctggccgtttgcgtcgacgatgatcattggccggcagatgcggccgccgtcgctcgctatgtagacgacccggtggtgctggttgatgaagatgctgacaaactctgacatccggccggcccgccggagcttgcggaagttggtgacgaagcgcttcggggccgacgtcaggccaatgatattgccgttgatgttgaccatgaacgtccctggccggtagagctcgttgccggtgacgagcgtgcagtctgccgggcggaaaggggatcgccgaggcgggcagtctgtcagccgccgcaagcaatcgaaggtcagcaaagggtggtgggcaaggcgtaccttcgacgccgagcaggtaggcgatcttggtgatcgtctcgtccgggacgtcggtcgtgatgtgcgtcatgagcgcgaggttcttgacgagaccgcaggcctcgccctcgggcgtatcgctcgtgcagagcatgccccactgactcggctgaagcgcacgcgggccagagaccttgcgcgtcttttcgaattgagagctgatgcgcgtcatcatgccgagcgcggcgatgaagctcagccggctcaggacgtgggtgacaccggcgcgctccatcttgaagcgcttgagcgaccaattgccggtcgaaattgagcggacaaagccagaggtgatgaagtcgctgtgcatgcggaagcacttgagcgcgtcaaattcggacgcccgattcggcttcttgagcaccttgtcaatgttggtcttgaggtccgagttgaactttttgaagaggtcctcgaacagcagcgacagcagctggccagccctgtagcggtgcgaggttgaaagtggcagtcagcgatgcggtgaaggcgcgccgaggggtcgtctgagtgtcggtcgacgcacagctcgaggcgcttgttgccgacatagtcgcggtcgtcgacattcttgtcgttgttgagggccatgaccacacgccgcgccatcgtcgcgacataaatgcactttggccggaagttgccctgctcgacagggacgtgcgcgaggacgatggtcgacagcgcctcgatcgcctcctcggccatcgtccgccgcgggcccgacatcttgcggttcgtcttgacccgtgcgccaatgtactcgagcgcctgcgagctcgtaaagaccttgaggctggatgggcgagagaggataaagcaacgtctgcgtcagtgtgcctgcactcagatgccaagggacaggccgcggcaggagaggacgcacagcgccgcatcctcgaggttgatggcaaaatcgctgtggaagccctcgtcgttgccgcagataagctggaggacctccttgtctgactggcagcccatggccttcatggcgatgacgaccggaatctgagggcgtcgtaggctagactggtcagcgacctcacccacagcgttcgaagcagcgacagcaagacactcacgtcctcgtgaaacgagttgtgccggaggtagattttgccatgcttcgtgacgacgtacgtctttgacttgcgctcgtgcgtcgagctgagcagacgtgacgcagcgcagtcagctttcgagggtcctgcgctgcccacatcctgcgcgacacgagggcacgcacgaggtaacggaggccatgacgaggcctttcttgggctccgtctcgacgatgatcctgttcttagacatctgctcctggacgaggatgacctggcgggcgggatggctcggctgtcagcaagactgtcgctaggctacgagccgccgctgacgacgacgcaccttctccgttcccttgacgacaaagtagccgcccggatcgagcgggcactcggtcatgtcggccagctgggcgtgcgtcttgtccttaaggacacacttgttgctccgcagcatgatcggcagccggccgatcggctcgccccggcgcttgaccatctgcttgccgcgaacgtactcgatgtcaacgtagatctgggcagagtaggtcgtgtcgcgcagccggcactcgtgcggcgtaatcttgcggtcgatcgcctcagagtcggtccgttcgggctggccgacacggatgtcggtgtacttgaggtagaacttggggtcaatgtcggacgtaaccttcgagttggccttgagaatttccttgagctcgacgtcgacgaactggagagacagagcgaggcagcaccagcagggtcagcagcgaggatgcaggagccaatcagtgggcaagcaggagcgtactgcagagacgcaagacggggtcagcacacgcagcacgccagaaggggcggtcagaccgcggcagaaacacgcaccatggtcaaacgactcgaggtgctgcttgacgagacccttgaccttcaggaacgccggcagcagaagccacttgtcctgcgggaggagccgggcagcagtggttagcgcaaccgcggccttgctgcagaggacaggagccgacgtacctcgaccgtcttgatgtcgtcggtcaagcctttgcccttccaggtcgtcttgtcggtcgacgcccaggccatctggtcctcatcgagcccgaacggcgcgctgccgtcaaggctgccggcctctgccagcttggacggccctggcacgtcttggacgtgcgcgggcgccttggacgagctcgccgtcggctgcttgaccccgccgcgaggaggcatggccgagtcgtaagagacagtgggcgctggtcggtcggatgcgcgcgagctggctgagtgctgtagagcggcttgcgtgggagtcgaggggtggcgagtgagagggtcggaggcaaggttctggcagtcgaaggtggccggtgcgacgagcagcagcagcagtcgaaagtcgaggcggccgcgcgcgcgcgcgaggtggagggcgtaaacctggccataacacccgcgtaaacacgcagcgcgcgcgcgagatgccttcgacgctcgcgacccacgagccacgataccccctctccttcgcccctcgtcgctcgtcgctctcgcctctcgttcgacttggtactcagcaccaccgcgaccggcccgcgactaggaactctatcacagccgcagcctcgccgtctagctttcaactccttctcaacctcgcccttgacgctcgtcggccctctccgacctcccccacctcgccacgcagctcgagcctgcccatgtcgaccccgacgtccggcagcaggtctggcacgccccagtccggcaatgccagcatcattctccgccgacagctgatgggtgagtctcggtcgctcgtgcgagtatggcggttctctctccattctcgcagggcgtgtcaaaggagggtggcggccgacttctcgcctgcgcacgagccgcatgtcaagcacttctccggccttctcactctagccgcacgtcctgacgctcgatcactctcgcatgtgcgcccactcctcgcagagctccgcaagcggccggtcgacggcttctcggccggactcgtcgacgacgacaacctgctcgagtgggaggtcctcatcatcgggtgcgttctggccactcagcgagcgactgctcctctcggccctcctgcgttgctgaccgtagcttttcctcctgctgcgccagacctcctgagaccttgtagtaagcaccgtccctacgttcccgctgccagcaagcggctcgatgctgactgtagccttgactcggctccgcagcgagggcggcttccttaaggcccgactgtcgttcccgcccgagttcccgctgctgccgccgacgatgaagttcacaacctcgatgtggcatccgaacagtctgttctcgtcatcaggttgctcgcacgcacgcgctcgctcgactgatgctttgggcgcctctcgcagtctacccggacggccgcgtctgcatcagcatcctggtccgtctccttggctcgctcttctttctttattgctgattgtgattcctgtccgactcgcagcacgcgcctggcgaggatcagtggggctacgaggcggccagcgagcggtggcttcctgtccacacggtcgagtcgatcgtcagtcccctgtcggcaactgcagacgacctttgcacctgaagccgttgagctgacggcaacctgcgcgtgccgtttcattctctgcagctcattagcgtcatcagcttgctgtcacaggacgttccgagtctcgactcgccggccaacgtcgacgccgcggtacgtcttgcacctttgcactgtatctcgcccaattagtgagagcgctgctgaccgctgcatctttccatcggatcatgtagaaggaggtccgggaggacatcaccggtgcgacgagcacctctgttgggcgacctcgcgatccaaagctgacccgtgcagcgccctttcgtcggcgaccaggctacaagaagaaggtccggcgtctcgtacggcggagcgcagaggaggcttacgactagcacgacgacgcatgaccatttataactcatcgtcagctcagttgtcaactctgccatcgagctccgattcggtctgcggtcacggcacgacccgcagcagcagccttgtcggctcgtctggctggccctgaagggattgcggcgatcgttggtcgctgactggcactcagaggtctgatgcagccctcgcctcccagtctctttccggccctcttcgtccctgcgacaacgctcctcccgttcctcgtcctccgccgacggcgctcgtcacgcttctcaagacgagcctcttcctcctgcactcgatactcgtcctcatttggatcttgtcccggcgaccgcctgatggacctccttgcagcggccggtcttctagggaacaagtaagtagtcagtgtcgtcaaattgcttgagacgagaaaactcaccaggagccgcttcccggccatggtccgacttcgtacgcccgttgtacatactgtcccctagacccttccggatgcggcgcggaccattcccaccaagttttgctgacatccgctagggtctgcgctcgggagaaacggtcatacttgggctggaccatacgggtaagtaccagtatgcctacagatacgacaatggtgtgcatcttctcaccagtaccgtctagtctcatctcaatatgtcatttcaataccgttttaccagtatgcgtagtcgtgtgacgctgcataccagtacatgtgccggccgacctcagaatcaggttgagatcgaccgccatatagaaagtgcggtcgcggccgtcggccgcctcctttgcggcaaggtacgccttcacccgactgccctaccccctgcaaggccgtgagcttcagtagatcgtcctctgcgtttacgtctcaccctttgcgctcacctggtattcacgcgggcgtggacgtgcgagctgatgctcgaggtcgttgttcagttgaggcgctgactgcggacggaatctgcgttctcaatgagatgaccgccgaccgtacggcatccctaggcgcagccaccttttcaaacagctgtcgtcgattgcgctattttcaacaaaatcatgctcccaggaccacctggccggaagatttggccccgcacaagtaagtacttgaggcggccatagatagaacgctggctcaggaactgtctaatgggcgacggagtgttaagacggtagggaactaaagctaggtcagccaagcacaaaggtcgtacggcgaagcaagtgggagcttttgaacggtcttgtcaaatgatagcggcgaagacgagaggtggcaggttctgcgggcctggttccgacgacaagagatggagagtcgcctcagccgaggggatctcgagagcgagttcgtagagtgatgagagcgccctcgtatgaggagctaccgacgccggaatggttacggcgctggtgtcgctgcagcaactcgtccttcaggcccggcaggtggctctgcgacacggagccaacgacgacaccaaggagaagagttttagctagccctctgggttgaatcgaggaaagcgagccgaatgagaagtgaacccagatggcactcgtctgacagcggtcgcgaattagaccacgacatctaggcgcaggtcacggggggctcagccgcgcagctggagttgttttatgcgatacactctgcactatattgttcagatcacgtcacaaccgtttccttaacggtcaggtcgtcaatcaggaggttgcgggttcgagtcctgccctggtctaactggataccataccctctctcgagggccgggtggctcaatggcggagcgtctgactacgattatcttttgccacccttgacgtatcgtcttggccgccttcgattaccaagcctctgctgagcctgaggccctgtcaagcgttgaggcttctatgactcaacgccgagaggtcgctggcctccgtcccgttgtcatcgtgacttgccgctaccattgccccaattgcgagtcagtcctctctctattccaagggccgacccgacttcctctttcccatgctcgcttgcgctgaggtacaaacccgcacattttgaacacgggtcaagcgcttggacgacctggtggcccactgttgtccagacccatgactgccacgaagccgagtgagagcaggatcaaagtcatcgaaccagacttcaggccgaagtttagtggacgttcggactgcgagaatgggcagcaagattcacgcatgacaaagagactgcaactgccgagctatccgagttaccgcgtttgttcttggaatcggaagccccctcattgtcgtactattcgtgacaccgccggatttgtatttggcgactttgatgtctgcgacaaccttcgaatgctttgcggggacacccctcatctcggcgacctgcggtaggagtacgactcgcttggacttgtgcgagcccgacgcatgcgtgatcgcaatctcccaaaagtgcaggacccactctggcgccagcttcaggaactacgccagcgtgataaagatgcagcggccttcgaaggcgaggatgtggctgtacttctcatacaaagaacactatttcctggcacagcagaggcagcggcatgcgctacacgacggagtgtgtgggctacagtcttgctgagctcccggctgagtgcgagaacgggtcgttaaaggaagagcgtcgtggtagttctgcgggagggtcgccagcgccggcgcgctgcagcgcccgcccgcgcggcggcgccagaagttagggttacgcttcgtaccatcactctcttgcccttacggcttcctccctcatagcaatttttagggcgcacgtccgtatgtatcttaagcagcgttcactcgactgccctgcccctgcaaggccgtgtcgttcaacacgggtagggcaggcggaacagcttcactacacattcgaggaatatatgaaactcttgagtcttgatcggcattgaccagcgatagtccaatatgaactaagcacagtactggcgcagtgtgagcgacacagagcgccgacgcgccggggcatggacccctttagcccatcaagctttcttaaatttcaaagcttccaccccctggacccgctgacacggcagcgctgaagctcaaaggttttaaattgcaaggctatcgaagtggtgcggagggtgcagcagccgacgatccaggagaagcgcctcgacgagaccgcaaggcaaccttcgtaagtaggtgggtgaccttccgtcgcgacatcccttttcgttcagcgcagatgctggcgcattactgctacttttcctatccgaggtacgcgagtagatgcgcgggctgccgagcacggcatatcgataatgcactcgatgaaacaagggcgatctaaccccgcgcgcgcatctgtcatggttcgaccctgctaggaaaagcagatccccgactcggggttcggacccaaggcctcagcccgcacggtagaagagaagtcaagcactaccaaatccccacccgtcaccggttcacaaattccacgtggaccctctagcaggacacccgatcaccaccggccgagtctagacccggcaaccctcggccgccggtcgttctccggcaccagctcctccggcgtgagtcaccagcttcatcggatcagtcagcatctccaccggatcagtcagcaggcacagccttttcaaagattcttcgccaccacactccagcctacttaaacccctgtagacctcgagtcgccacctgaatctcaagcttgcctcttcgttctccccatcacatgtccttgcccgtcagagctccagcctcccacctgctcgccacttacccctaacagcatcacgaccgctcacttgggatgctgctactgcaatcaagctgtgaacacagcactttggcttctgatatccacacgtgaccgcgcgaccgttcctccacctctcaagttcatcatgtactgaacagcttcttctctttccacttcacgggagattatcgactatgacttactctagcttgatcatgtacgagcgcacccccctctaatgccacaagtgaacgcatgactgattacccatcgtgtcttttgcgttgagattggtcttctgaattgccggggctgctgaattaccaagcgtcatgcgcaccgtgccgcagaggtgctgtgatagcgatgtggcaaaagtgaatccctaaccgggagtcgaacccgggcccttcgcgtgagaggcgaatatcatagccgttagacaattaaggaattgatgacaatctataagattttaacgtataagtcgcagcgttattacagcaacatctcaagcggctttgtcttccagcttcgcaggcaaggcaaattatatgcacatgcccaaaaccttcagctcttgacaagagtcgaccggtcagagctgaaagttgtcaccctgtcaagagacacctgactcggtgatgtagcgacagcgctcggatgaacaggatcttttgtattcaagttttctcagtcacatgaggtggctcttaaagacatgcacttctcatctcgcggagcgctgggtacagctgcacgacagtctccaatgtcctgaagtctgcgctttttgtgtttagccaaattcggcacttagctcagagcacgcacacctggtgcgttggttcagatgcgcgcagtagggcagtcatcggtactagcgcacccggcgacgagtggagcgaatcaatcgaatcgccttcgcggactttgagtgaggtgaatacggttacgaagggaacaatactttacgccgaaagcttcgtcgcataacatctcggcgatgatattatttcccaagcaggagtaaccgagcgtcttattctaatggaggtgaatacgagggtggatattctgctaccaaaagctccgtctagctgtccgtttgacatcaaatgcctcctctcttcgcccttttgtcagcacgtcgccctctgtctctctttcccgggcctcaagcgagccaccaggtcattctggcgttgacgtaggtgacccggtcgcgctctgggtggcctggtcgccttggtcttgtagcacaacgaagcttgtcaaggcgattagtacgtcaaccgctggccgcgagttacactcggatgagcgtccgggaggccgactgagcgatgtcgtcggcggcagcagtgtcttggttgagctcgagcggcgcagggttagggacgtgtgcaggccgcaaggcaagacgctcgaggtcggctcaaccacagccgcgacctcaaccgactcggtgacggctttgttcaggatcaccgccggttggaagcgacacgttggcctcccaatttgcgctagaagtcggcggtgtcgacctcttggtctttgtcagaggccagtgtctcgcgccagccggttggcacgctctgcacgtaagtttgaagcgatgtcgccgtccaggtcggtggacgatcgtggtcgatgaccattggatctgctgagtttcaggccattggcgcgtcagtccggctgctactcgagaatcgcggccgaccgcccgcgcgacgtgcaccatgcgcacggcgagctcgagcaaatttctgctacgctcggccgccaccatacagggcatgtggccgaataaagtctcaacttgttgatgccgcgcttcgacaggtgtacgaccgactgaccacgaagctcaacctcggccgccttgagccaggcgggggcaatagccaccgcccagtcccaggtccaggtcagtcgagataaaggtggggacgctgctctcgcggcggtgatgccaggccagcaggtgcagggcgcatgccactcagctaggccgttctgtagacttgcgtaagtatgaaggagcgctaaaagatggcaacgagattggccaacctttataaagagatccgacggccttgatgaggatgagggcgaaatatgtcttgcacattagcgtcgcggacgagcgatgctacccaccggcgcaacgtcctgtaagagcatcgacagtctgatcggcgggcaatcgcgcccgactgcgatccttttttgcgcctcagccgtgtgccgaagctcgtaacaggtgttcagggtcgccatttagggttacgtcgtcggcgccggcccacagagggaagtcgtgcacgcctacaagcgcttgcgatcagcaatgctccggcgggagagggcgaaggtgcttagtcaaccacgccagcactcagttgccatcggtggcgatgactgtgaaacgggtatcgttgtgggcgaggactccctttaggatgggcagggttctagagaaggcggtgcgcggcagagtcgacccgacacgcgagcagacagagcgctacagcttgcgtcaagctgcctgtactgtccagccgagtgatggagaagcccgaggcctgtttgggaacagcggctctcaggcaagacttggaagtacaggcattcgtgcggacaagttcgtgaaaaatttcgaccgataagctggcgtcctcgtccagcctttcgcggccaatgctaagagctttctttgacgcagcatcgtaggccattttgcttcactgcgatctcgtcaacggcgagctggccgcaaggtagttcggaatggcggatccttgcgctgtgagcttgtgaatgaggttcaattctcctcagtcggcgggtctacgcttgcaactcaacggcgttgatccgcacgatttgggtctccggactgccgtaattcgtgaaagctttgggcgactgccgccgaagattttttttcaaggatgttggcgtgcagctcatcatttgcgcagctgaccaccggtttcgggtccaccggacttcgctcggtttgggtctcaccaacatcaagaagctcctgaagcggccgacggaccagaacccggagaacccgcgcggccggactgacggggacctcgccggtgacgaggagctcgaagaggcacgctaccccaccgagctgtaggcagacgccgtcaaggctaacaacaagctcgacgccccattgtctgcccaggcctgcgatagaatggcaaaggccgatggtctcaacttcgctcgcgacgttccgcctacaacaagtgcaaggctgcagatatagacggcgacgacctccagttggtggacgaggctccggaagcggcctctttcgcagccgacgtgaacggggccgctgaggacgcccgcccacaagacgctgccgcaggagcagtttaagccgcacctgttcaagcgccgccatcagccgccgctatagctacaggacgccttccagcatatgaaatggcctaagctgtcagggctgcgccgatacgcagcgggaaaagaagcgggccgagagcgagcggtgttgcaaggagcagcgtcgccgtgaggacccgcatcgagtgcgggaggaagaggctcgtcttgagaagcgtgacgagcgccgtcggcggaggacgaggaacgggaggagcgttgtcgcagggacgaagagggccggaaagagactgggaggcgagggctgcatcagacctcccagcagtttagcaaggacttcgctcgcccaggacgatgctcccttcgtctggaggctgactgtttcgatggctgatgagctgagcgcggtcgccatgagctcgtcttgctacctcttgccgactcgggctgaagtggttagcggcgaggcaagcaaggatagggcgaccggcgtttgctccgaccgaccttcgctgtcgccctcccaatcaccatctcgcctgccgtcttcgacccggtcctctcctcgacgcctgcctctcagcacggcagctcaggctcctttcccgaccgctgctatgccatgcgtcccctttagctgctcagctgtgcctagccgtcggctcgagctcatccttctcgctcgtcctccgtcgcagacccaacgctcgcctcccctccatctcggagctgcctgaagagatccagcgcgaggtcattctcgccatgctcgagccgctgctcgaccgaccggtcgtccacgaccgctatacgatgctcgagaaccggcggcggctgcacaggctgctgctcgcctgcaaggcgtggttggtgagcgggccccttcgatctcgcgctggcctttcttctggacgaccccaccgctgacgcctctgcttcttccgctcgccaggccaccgccctgccactgctctaccggcacgtcgtcctcaagcccttcgaagctgatgtcgcttgcttccgccagtcggcgatcccgacgaggcccgaactgctggcaggcgtgacgcgcttttgcgtcgaccctcgcgctctcctgataatcatgccgccacctttcggcgccggccccgttgggatgcgagacctgatccgttcctttccttgccttcaaacggcggttgtgatgtgggcgtcaatccccaaatggggctcacacttggcacctgctgtccggtgtcgcccgtccgatctgaacgtcatcttcgtcggcccagcagagctccaggagaacgatctcggcgcgggcgacaagataccttacgcactcgaccgctgcttggacctcttcgtcgttacccgccttgagattaccgcttgttggtatgccaaatggccggcctacctgggctcccttgcacttcccgccctcacagacctccgtttcggcaacctcttcgcggacgacctcccatgcgtccaggcgatcctcctagcagcgggccgaaaccttcgccgccttcatctctttagccatgagactcttgaccacgagcttcccgcccttctgaacctcaacctgccagagctctgccctgccttcgaggatctcggctgggacgactactctcgcaacgtgctgccagccactctggcacatctggcccgaccggcgactcaactcgcttcacgtgttcagacccaaggcaatgcccttccactcgcacggtggatcgtcgccccatgacttctcatggaccgacccagaccttcccaccctccactgggtccagctggcgatctcgctccgcccacgcgtggcctgttttggatttgagccagactctttccgttggtccgatgagaacctcaaactcgcacgggatttcgctcgcctccttgctgccgacggccgcaacattaagctcgaggacggcctccgccggacgattgagcctctcaaccacgcgcgtgcgtcgccttcgacttcgcagaggacgcccttagtcatccttgatgaagcctggtgctgaaggactcctccttacagttttccgttccgcctcgccgtcggacgcgactccgtcgggcagcccgacgagttcccagggcggtcgtcgtgcgtcaatctcactctcgctgcctttcatctgcatgcttccgatgctcggtcggacgatccttgctcacgcccttgtgtgcgtctaccttcggccgctgctaggctcccttagtcacgcgctcctcagcttgcctggaaccgaacttctgtgccccttctcctctgcaatgatctcgctgttcccttgcttctcgaatgcccgtcctcgttccactcttctgcaagcgagactgacagagcggatcgaaagttgcgacgttccgcgaggcgccaacaagcagtgggacgagggcatgcaagatttgggtcgcccggctgcgcacctagtagccctccttctcgcgaaggtaggtctggacctgcaagggatggggcggcaagaggttttgagtcagcctggcgctcgtcgttcctgctcgccctctgcgtcgattcatcttggggttaggcgacagactgacatagactgcgagcttgcgccggccgttgcgctctgtccgccagatccagaagacaatggctgcacgaggaagtcgcgtcagagaagcgagaagtcagcttctttctttgctccgcacaattgactcggcaaggccaaggctgtcgaaggacgcacagccaaggatgatggcgaggacggctgcgccgaccgtaatgcctgcgatgcgctttgtgcgctcggtactgcaggcgacaaagaaggcagcacgcggtggagtcgtgggtcagccaatgaactcgtacgagcgcacagccgtctgggcgtactctggtgcgctcttgacgacaatgtagtcgacatcgagcttgctgccgtcgacgtcggtcaggacgacctcgtggaagctcgagtcaaagccgctgccgaaccagagcagctgctgggtgaagcccgcccggctcgagccgttccacacgccctgcggaacgccgtcgaacgtgaccgaataaagattgtgatccggctggatcgagccgaagaggtagcaggctgtgccggtaaagttaacgcgggccgaggccgagagctgctgggtgtaggtgctggaaggagcatgagaggtaggcgggtcagcgccacccacgtcggcagaccgagtacgagccaccagactcacgacgtctgcatgtaggttccctgacaagaggcgaaggagacgcggatcagcaagaagaacgggacgctcgctgaggcggagacgtacttggctcgcggccgcgcccgcaccccacgtcccgtcgtacacgaagcgactcgtgtcggcgtcgtcataggtgtagttggtgttgccgcccgtcgggaccgtcagcaccacccgctcgagcgccagccatgcgtcggtgggcggcgacgaggatgacccggccgagccgcttgtgttaagcatgagggtgtgctcggtgtcgggcgagaggttgaggaaggagccgagcacgccgtcgggtgtcacgtcgctcgacgacggaccggcgccgtcgacagccagcgtgtaggacggcgagtttaacgaggtgccatagacgcgcgccgcggtaccttgaggcggtcaaagggcaagaggcgggcaagcagtcagtgcttgactgcgcgtgctgcgtcgtcaccgcatgagaaggtacaagccggaatagctcgagcccgccgtctcctgagaccgcggcggacctcggtagacgcaagggggacagagtgctccagtattgactgctgctcgtcgacagggacgcaccgttgaagcggacgctcatgctctggccaccgccgccgtacgtccagcggacgagctcgccagcacccgacgggagcgactggccaaagccgccgcccgaggcctgccagccttgagctggcgcgccgtctccaaacggaaggaacgagagaaacggcgacgtgaacgggatgacgatcgacctgttgcagcagcccgggcaagcaggagaggcagcaaagggtcagctcgacgaccaaccaagaacacgctcctttgcgcgtggaaaggggcgaagggagggagaccgactcggacatggcgtcggcgctgaaaagctgtagaccgtgagtgctactgttgagtagagcagggaaaggagctcctggcgtgacggtctttctcctggcgtgtctctgaagtcgagaaggtaggtctaaaggaagtggctgtcgggagggctcctggtcgacttgctctcgctccgaagcctctgctcgctgccggtcgacgacgaccatcgcactctcggtccaacctagaccaaggacaagagcctcgacctcccggcggacctgctcaagcggtatgcggtccttctacgtcttgacctcggcaggcaagcccgtctttgcgtcgtccgtccttgccgtgctgcgtgcggccgccctcccccttcctctgggctgaccatctagctgcccatgttgccttcaccagcgagccggacgatccgaagctcgggaccgtcgtcggcgtcattcagacgctcatcagcatctttctcgatgccgacccggtggacaagctgcggtgcgtcggccgccatcgaggacgccgctgatggcgtcgcgtgcgtgcttccttggctgacacccggtcccgtcggctctgcaggacgattcaacgcgggtcaacccaggtcaccttcctgctgcggcctccgctctactacgcctgcgcctcgaccgagcgcgagccagagtcggtcgtgagttgccaccgttcgaactgcgccagctgcgcctggacgagcatgaccgcacgaaccgagatgctaaccctgcacgttgccccaggctcgactgcagctcgagtatctccatctcgctgtgctgagcgccgttcctgagcagcagctcacgcgtatcttcaaagaccggacgaactttgacctcgggcggctgctcgagggtgagtgcgcactgcaccttcagcccgcaatcaggcctcgctgaaccttccgctcctcggtccgccttccggcagggaccgatgccttttttagagccctgcttgcagatttccagtccgactttgggctgttgacgcattctctgacgccgctccggatgaacccctacgtgcgcaagacggccggccgctgcctcgccggctgctccagcaaccccgtgagcaccgtcttccttccgcagcaccgaactgtcccaagggagcaccgcactgaactctaacccccttcacctaaggacttgctctacgctctcctgctcgcgccctcgctggagcccctgacgctcctccggccccgcaagcactcgatccacccttccgacctccggctcctcctgacgctcctccggtcgagcccggctctccgtgagccaggcggcgagagctgggtcccgttcagcctgccgaagcgcggcggcgagtgggtctggatctacgtcgcattcctggagtcgtcagaggtgggtgcgggcggggctggagccgtcggcttcgtcggcgtcgggcgcgacaaggatggctttgggccaatgcaggccgccaagggaaagatcctcaaggtgcgccggggtggggcttgctactcgtcagaagctacccgactgagctcgtgtgcctgctgctaggaattcgccgagacgggctgcctgccacagctcgagcgggccatcatcgaccatccttacgccgtcggtcagtcccatctgtctctagaatgcgccttccggctgacacgccttccctctgctcactgcctcgaagccgacctagagattcccggcctccaacactttgtctacaagtcgtgcgccgccgtccagctcacgcagccggtctggtcggcgccgtacgagtctgaggccgaacgcttgcggtgcgtccactcgcccggcttctttgcttaggccgctcgtcaatgctgacgccgcacgtcgcttgacagcctgctcggccactaccaacgcgcgcatgatgccctccacggccgcagcgcgcctggcgcagagcccttgactttactcgtcctccgcacagagttggagactgtgctcggctgggtacgtgtcgcctgactgccgaccccactgctcaagcgccggctgacccgcgcccgccgccagttcacgcaagccttcgagctctacctctccatcggcccggaagtgccgcaagaccaggccgtcgtcgtcgccaacgcggtcgcccgatgggtcggcaaagaggagccgcggctctggctgaaggatacgccggtcttttgagctttggtcggatcctgtgggctttggaggttcgacgagtcgcttctagccggccaggccgatcctcacgctgcggggcaacgacgaagccctgcgtcttggccggccctctctccggcatcgccttgcaccgcctgcaaacggcaagctgctcggcggcgacaccgacagaccaacacggccggcacgttgcgtgcttgggtcgcttgaggctccctgccgacgatggactcgcagccgacagggacagacaacgtctctgtcacacactctttgcctctgccctggatcaagcaagccaagatcccgtaccaagacctgattccgggcgatctgtggcgtgcatgctcgctagagagggagaggcctgggtctgcatgtctgtcatgcatgtccttctcttacgctcctggcttgtaaaagcgaaacaggaagctcatttatctagaagcgctcagcagtcctagccttacgatcctgccttgatctctgctaatgcgagcgaggcgagctcggcgcgacagcaggagggccgtcgccgcagggccagcgcgcagtagcccaaccgctttcggccggtcaccctccccttcagccctcgctcagactcgaaagcagaggtttcacagcgaactcgtcatcatcgttggactggccagctgcgctcgcggctatacggggggaaggggttggagacgggcaagaggggcgcgcgaaagaagcgagacgctcagttgtggttgacgttactggaggggcgcaagagggggcaaatctcgtcagcacgacgtcttagcgtaggaaaagagacgaagaagacttgcaagagatcctcctgggcctgaatgacacgcttcatgagggtgacttcgcccatgcgaacccggaggcgcgggtcgtacgacttcttgttgggcttgtcagcaccgtcggggttgccgacctgcgtcatcaggtagtccttcttctcgaggatgaagtcgcggatgcccccgaggtacgcccactggcgctggctgagacggggcgcaatcgggcacatagcaaaagcccctaccggcgctcgtcgaggacaaactcagggcggcgaccgtcgaaggcgagaagggagagccgccttgctcctgttgctccgaacgatcactctctttctctcgcctggcctggccaggcatcttgccgagctcatacgttgacggtctcggtctgccagaggcctctgcgctctcgtcgctcgagtcgccgtcgtccaggcggcctcctccctttgaacgcagcgcgacgtgcctgtcttccgagttctgctttgcctcggtcatcctccactggtttgccttcaacttcctcggctgaccaagggccggacggaagatagatgcgcctggaacggacgaagcgctgacccaaggcagcaggtggagagtcttgcgtcgcgtaggagcgagcgcgcaagtcgcgacggagttggcgccatagacgaagtggtcttacgacggtgtgttcaaacctcaacccggccgattctttgcgcgctcctctcggaagtccccgcttggagagctaggagggaaagtgacatgaattggcatacgggtcatgttaaagggggaagatgggggcgggtcaggtaagagaatggccgcgctattggcgtaagagtcgtgggatcataaagcaagatcataaagcgagaagggagcataacgtgagcggtcgagcagagggtgcgagaggtccgagaaagatgacggcgagggcacggcactggtggcctacgggggcgatcggccggccggtgaggccaaggtgcggtagggaggttcagttagccggaccggctgcgtcgttctcagacctgcagagaaatgtcacttgactcttcgagcagaacttggcacaagagcgggagagacgtactgagcccaagtcagctcgccgcagagctcctccatcgtctcggcctggttgatgacccatttgtggagcgagacgacatccttcgagggcttgctgccagagcacgacgcaacgagggcgctaccgaggatgagattagtgacttgctcgtcagcctccctggcgaagcagtcgtgacctggtctcggcgacgcaccggatcttggcaatgttcgtcatccagccttcgagggtgccgcgcatctgagcgatcgcgtcatgctccttctggaggcgctcggccttgagcgtgagccggtcgacagcaaccagtgcggtagcgtgggcggcgttcgtgcacgggccgggcctgcgacgggtcaaagggagtagcgtcagtcgaagctcatagcaagcgcgcagccaaagaaagagcgacccacacagcaggggcagcacgctcgagctcggcaacgagcgccttgagctccgcaatctcggtctcgcattcctcgagctttttgccggcgacgaataggcgcttctcggacaactcgaggttctcgatgatttcctcctgccgctcgatcttctccagctcggccttgatcgtcccctgcgccgcctcgccggcgcccacagcctctcgctcccgagtctcgagttcgacaatcctggcgtcccgagtggcgagcgtctcctcagcggtgcgccgcgcagcgaccgcagcctgctcgagctcgaggaccttggcttcgagctccgcgaccttgcccgtctggctcggggtgaccggctggctgtgaccgagcgtgctcgatgaggcttgcactgagcccgcctcctgtgtcgtcgtccgggcgcgcttgcggacacgctcgtcgtcccgctcgtcctcgtcatcgagcgcgcgctgcagccgctcgaccttctcctgcaggcgggaggcctcgagtttcttggccgcagcacggtccgacgccactcgctcacgttcgttggccttttcgacgcgctcgtcgggcactttgcagcgctgttgctcggtgtgaagcctggagcccgattaaacgagtaaggggggccgaccaggagcgggaggattgcgatcagtgacccggtcggcctcggagtaagctcaggagcgagcatcgcagcgaaatacatgtcgagcgtcctgtcgagcgtcctgaagagtcgcctcttctcctcagcagccgcccggtcgagcatgaagtgccgggtgctgcccttgtcgttggcttgcgagccgagcgacgggctcaagccggggtcgatctcatcctccgccttgctgccggcgaacgagtgcccctgcgaggggtcgcgcgactcatgggagcgagtgtgacggccttctgacgagctaaaggtacggaagcgagatggatggtagttgtgggtgtgggtgcaggagcgtttgagttgagctgatggtgagaaggagagggtctgcggggaaacgcctgtggcagaagtcggcgtcggctcacgtgcgtacgcatgaccgcacatgtacctaatcagacttgtgcttgaagcatacagacttccatatagatttcagccggttagaagactcacgcttcgtccgtcacctcgacaccgccctcggcgcccttgacgaccaagggccggacgacgcggtcccaattgacgcgccacgagccccaggcgtgccgcgaggcctcgatcgacttgcgcatctgctcgagccgcgggtcagacggcttgagaagtgactgaggggatggagttggctcagattgagcgacttgctgcggtcagagcaggacagggagggaggcacgcacgagcagttgatcggcgagctgggtcgccgtagaaaaggtgcaaccgttctcgccctccttgaccagctcatggaggctataggatctgaaagggtcagtggcgctactcagatacacgcgcgagcggtgacggacgcaccagtcaaagtcgcgggcgaggacgggcaggccgcagccgaacatgtcgacgaccttcatcggtaggtcgagcttgctcgagctttgatgcaggctgacgccgagatcggcgctccctgaaaaggcgatgcgaaggcgggtcagccgtcagcctgcagggaagagttgaccgagcggctgcgacgcaccgagcagtactgggtactcctcaaccgcgagccagacgcagcagacgccaattgacgtccacttctcggcaacccgcctccgctcagcctcacgctcgaacgcctcgcgcatcggacccttgcccgagatgatgacccagaccttcctcctccggtcccgattccggccgctccgaacctcggccttgacggccccctcgtaagcgctcagcgcgtcgagcaggaggtcaaagtcctcgtcgggcgtccacgacgtgctgctgacgacgagcgtcggtcggtcgtcgcgccagcgcggggtggcggcgtcggccggtgagagtgcagatccgctgctgacacggcggttcttggcgagctcggtcatagggcttgattggggcggttctgagggcggcagagagtcgcgcagaacgggcgagagggtcgggaagaggcgacagaataactgcaagattggtaaaggggggtcaggacgagcgcagaagtgctccgtgcggcctgaatgacccacgctgtgagcgtcgacctcatcgctgcgttggaagtgctctggcggacggtcatgaaggaccttgagcttgcccctagtgccaaggatgaaagtcagatcggcgggccacgcgattgtgcatcctcgcagcagaacgcactcgagaccccaggaggagacgacccagttgcgcatcgccttcgtcacgaagaggtgcgcatacgccttgtggccaaagaaacgctcgtacctgcagcaggataaaagtcagctcgcgctacgcgaacgcagagggaagcagagggaaggagatgatgcgcaccagatcgagagcgacacaaacggatgcctcgcgctcagcttaagcgagaggatcgagaacccgaggttgtgccagtcgacaataagttttgagccgcgcagatggcaggtgagctgagcgagggcgagcgttgggatcgacggcgggttctggacgtcagcgagggacgcaatgcagactgcgcgtcagcatcgtccatctgcagagggcgagcagatcgagcacatcgcttggagagcatcggctcctgcgtacctggaccaggatgaactcgggcgggtcgggtagcgtcatgaggacccaaaggacgacggcgcactgccagatgaccttgaccgggccggcgacgacaaatgcccaacgcggtgtcgccagcggcagcggcaggtagaccggcgtgaaggccgggtgcgagagcaaggccggcaggagggccgagcccgggtagccgatgagcgagacgtgaaagtgctgctggaggaaggagagcgaatggtacatcatgcgcgggctccgtctgcggcgcgttacggcgccgagcaggtaaggcacgagccagggcggccgaagggcagggtgaggagcgaggcgagaggacagagaaagagccggcatgtcagcccagggtgcgttttcaggaccagggagcgaggagctgaaggtcggctcggacggacccgagatcgccgaggacgagcagcgcgaccgaccgcgttggccgggtcggcgctgccgggaggaaggacgaggcgagcgcgagcacgaccggcagcaggacgagaccgaggccgacggcagcgagcgtcgaagcgtcgggcatggtgcgagagagcgagaaggcgtcctgcttagacagtctggcgttgcgagcgaagctggtcgtcgtcgccaggtcgagcaagacatggcgagatgaaccgaaggagagcgaggcgaggcggaggcagccaaacaaggccagggcgggtcatcgtctcctcgacctcgacctcgaccatctcctctcttcccttcacagcatgtcctcgcccttgactgcaccagccctgctggcctcgcttccctcgctcgtcgagaccgcctcgacgccgacgctcgccagcccggtcgaagccctcacgctcctcctccacgcgactcacgtcgccctcggcttccggcttgcttcagtctcggcgacgggcggcagcgaaggcaaccagcttgcgtccgaggcgctcaagaagggcgagattgagtacaagcacgctcagagcagtctccaatttgttgtccgcgtcggcaagctcggcggccgggccgtcgttgatgcgatggcggttgaggtgcgtgacctcctcgccacgtagcgcgcccgtcactcgtctgcctccgtcaggtgctgacgcgtcctttaggccgacaagccgtaccatctctcgtttccactctcgtccaagctcgcgcccgagtcgtcgttcccctatccgctcgccccgccttcgagcgagaagccgctcgcccacgccttcctgtcggagcaatcgctcgaggccatcgtccgcgagtacaaaaccgaaatcgtcgacaagcttgtcccttcgcttgaaggcaagccgactaccgagcagcgtggggcagctccggatgcacgtcggggggaccggcagcaggtcaacccgccgggcatcccggccaaccccggccagggcggcggcagcggctcgcaggacttccgaggcctccctccaacgcatccgtccatcggctcagccgacctcgacccgctcgccgcttcgcccaacgccttccgcccgccttcgctcttcggcggcggccagcctcgcggcggcgcgatgcccggcggtatgatgatggacccctcgcaattcccgtcgcacccgggcccgatgaacccctcgccgcacggcttccacccgcccggcgcccgctgggaccccatcacacccttccagccgcccggcggcggcggcggcggcttccatctgggcgtccctcctcgcggcggggcattcggcggcgagcccgacaacgacgagtttatgccgccggggatggagggcggcaatgatgccgactttggcatccgcttccctggccagcaccggggcggcggccagggaggcgggaggttcaatctcggcggcggcagcttcggggtgcgttcgcgcgcgtctgcggcccttcgaccgagagtcacgctgaccatcttgcaacgccctctttcgccagccttctgcctgagcatcgctgctggctgctcggtcgccctctgctcttccagatacttcatgcttgctcctctgtaccatctgacccacttgctcgctcctcgcactctttccgcccatgtacccgctgccgtctagcccaccccttgtacctttcatgcccatgaaccttttgacgaatgctcgactgacaaagcgcgacacggcaagtcgccctcgcaacaccgacgtcgactgtccggctgacctaggcggacgtcagtcccggcgactcgcgatcggtcgtcgcgcagcagcagcagcaacgcgacctaaccatctctcgctctcgccctcctgacaaccacctcgcctgccacctcccagtcgcctccccttgacacatactctcgtaccgccaccagctcgcttcaagatgcccaccgagaccggtattgatcgctcgctcgccgccgccgccgacgacagacttcacgccgcagttgccgagctggcacggtcgcggccgctggaggtgtgcgtcacgaccttcttctcgacctacaacggatggtgctgatctttgctagctggcctgactagggctgagatgctcagatggatgctgcgcggaaccgaggaatgcgtggcgactatgatcaagcaacggctgggcttacttgagtcccaggtcggcacattcgagtccttgaagacgacggctcctgttgagaaagatcgctgacaggcccatgaatccagctcgagaatgagcaggatgccgagcgtctcgagtcggtcgcctcggcgctggagaagatgcggccaaagacgcacctcatccggttcgttttgtcgtccgtatcacggcgcatgacgtctttgctaacctccgccgctcgcatacagggacgaaatccagcgagcgacgtccatcaacgaccgctctctgcaggaccggcagctcttccgagcgatgaaagagcagctcgacgccgtcgaccgcctgcatgccctcgcctcggcccggtttgtcctctctcttcgcccgggccgcatcgcatgaattcgcacatctgatagcacgacaatcctttaccaggccctgagcactcgtcgtcactcaaggagcgccgaagatcgatattgaggcgcctgcttgctggatgtcgcctgcttcggcccgagcgcatccatttgaccgccgtttgagtgagttgacgacgagcgcccagcttcctgcccagggccatgactgacgtcgatgcctcgagcgccggtccagctctcgctctccgtccgccctgactatcatctcgtcgctcttctcaacctcccttctcgtctgtctcgaccctctcgcctcgcgttcttcatgaccctcttatgcctcccgcgctcaaggtcgttggcaaccgctacatggagaagcgcgtcaacctccgcgtcgagcacgtcaagcactcggcctgccggcaggagttccttgaccgggttaagcgcaacgccgccctcaagaaggaggccaggggtcggccggctgaagggggcgggcttgctggctgctgctgacacggctggcgggagggtgcgcagcggagggctgctgggcgtcgcccagccgatggccgcctggtgcgaagcgaggcggatgggtcggcggaggtggatggcagggagacggctggtcattcttgtcgagtgaggagtaagggataagtgaggagacaggagatggtagcgagggttgaacgaggtcaggcggtcgctcgctgagcgcgcatcggcgcccgccggcgtcaccaccccggctggccaattcggcgcccgacggtggcacatgcgaacgagattcgacctcagtcttcaagtagaagactgattgccgtctgcggcaggcgtagacgggcggcgtcccattgccaaagagttggcagcgtctccgccaggtctgcgcaccaatgttcgccgctcaccgcccctccgacgtctcactcccgcacctggcccttcgacgagatcgcatcactccggcgcccctatcggtcgttcttctgcaagaccatcgcaatatctacttgcgtatcaggcagtagacgttctcgccaacgacaatttcggcgagatggcgtgtgcttcctcggagggccatcaacagcccgccaaacgaaatgtagacggtcgcgtccttttccgggccggggacatcctcgtacttgtagcactggcgagggcggagcgagggtcgagaggggttggctggtcagtgtcggagctcgccagacggtcgagaggggctgcgcagggagcctgcagcctcgcggatccaccgagcactgcgcaaagctggatcaactctcgaagaggctgaatcctcgaggaagtcggccgtcgaggctgctgacgattggcctgcctcgagtcgccgccgctcgacagattgccaggttgacttgggctcgcaggctccggccggacgcagagcccgccggcaccgaacggtgatgccgttctcagccagcaccgtcagccagagcaatgtgaccagcggcacccgctgtcgctcccaacgacaaggttggccggagtaactgagagcgcctacagcgcacagcggccacgaccgccgacccctgcccgacgctggccctagaccgaccccctttgcggtccagcctcccaccctacagccaggtttggtcgataggaagcagccggacgtaccttgccgtagacgacgtagtcgaactcgctcgcgagtccctcgtcgccgccgcgccaagcctcgcgccgggcgatgcctccctcctcctcgtcgccgtcattgccgccggcggccggggccgagccaaagagggacgaggcgatgcagacggtaatgcggtcgccctcggccagggggaagatgtccgagttgatgtcgagcgtgagcgacatggagagcgcgggcgaggtcgcctcgatgcgcgacactggcgggagagcggacgggggagcgagcaggttcggtaagtagaggtcgagcaaaggagtcagaggcggtccaggatctatgtgcagcagcagagcaagacgctcgccaacagctctgccgagtaacctcgatgaccgaggaccagccggtgctcgagctcgagccgggcaggccttctgcgcgcgttggctggccagcggtgccgcctccccggagcctgaggcgcgactgacctcggtcaaacttcttgccgcccttgtcgacggtcgtgacgttgaagaggtcgtcaaaaagcttgccgtcggccatcgtcggttaagatatctatcaaagtgaggaagggagggtaggagtcgaggagagttgcagcagctgggtcgagagcgactccctgggctggccggccgaccctttcttctttttctggcccgaccgcgaccagcagcccctgacaggacggacgagctcctgttcagctccgtcctgccatcggatccagaccaaggtcgaccgctaattgtcaaaggagccttctcaggctgacctgctcgcgagctcggtctgcgcttgccagcctcttgatgagagggctcgttactcaacttactttcaccttgccttcagcccggcactcgactcgctgtcctcctgtccccctccccccccctttgtccagccgtcggacaacaatgcggccctgctccggccagcgccgtcgtgtcgactcgtcgcaaccagctcagcacgcgcagacctgctacctaccctctcacctttcaccttcccgccgcagaccgcttctcacccggcagcctcctgggatgtccctgctggcgagcgagggaagctggcgtcagaagcagcagaagcagcagcaacagcagacgctaccgtctcggccgaccgtaaacgagtgcgtccgccctctcccgtccgctccggccctctggccagtccgccctccgcctcgcctgagcctcgtctgctcctcgcgcccttctgacctcgtaggtctcgcttcattgagcactttctgagctcggcattcagctcagacgccggctacggtttcatcccgctcaacatgcctgccttaactcccgcgcatcaggcgccaccccccgagcagcctcctttcgaccagccgcacccagaccacggagcagcgagctggcacccacgctaccgcgacgacccgccgaccgagtacgaacccaacaccgattcaccggcgagcgaccagcgcccaacagctgatgactactctgcgccgctcgcgcgcgagctcgagctcgtctcgtccgtcgcgtcctactctggcattgagcgcggccgctgggagggcgggacctggatccgggcaggaggcgctgctgacgaaggagatggcgtccatgacgacgacgatgcgactgtccgaggaacgacagccgtaaggcaggacgatggttatctcgggcgtccgccggtcaagacgggccggcacggccacctgtttgtctcctatgctacaatttcatccactcactcgggggctgacgccagtataccttcccacccctgcagaactgggatggccaagatgcgcaacgataagctgcgagagcgctacctcgctgccgagccggtgcgttgcgccctgtgcgatccgtctgtctgcgccgatcaaagctgacctgtcggcctcgcccctgcaggagcggcagaagaaggccgcgctcaaggcgcacgcagtggcgtacaaggagcaggcgaacgtcgtgcgtcggcttgccgtatctacgacggctgcgtgggtgctgacccgaaccgcactcatctcggaggtcaaggacctcgtcggccagctgcgcgagacgcaggctctctttgctgcatcggccatccactcgggcatcgcagcctcgtcgctcgccgcgtcgaccacacaggccgcccacctgaaggcggacgtcaagcgtctcgaggatgcgctcaaggaggagaagcgggcggcgaagctgaaagaggaagagctcgcgcgcgtccgggcgggcgagaaggaggcgaggaatcggcttgtgcgatacgcagaagagctcaagattcgagaggctcgcgcggtcggccgtcgtgagggccgcgaggaggtcggtcgactgagactcttgcatctgcaccgtttggaggtcgtcctgaccttctccttttgctctttcgccaggcccttgacgagtactcacgctgggcaccgccggctgcctcaccgactggtgctcagcaacctgaagggcccccagctaagcttgacgctgcgcacccgccatccgtccccgacagccccttgccggcaatcgcttcggtcgcacccttggcggctgccctgctctccgcggagctcccaacgatggccatcagcccgtcgctcgcggcatcctcgtctctgagggcggcccactcgcacgcctcgcacgtggccgtccaaccggcactcagcgtcgaagaaaaggagcgggccaaggtccggacgatcattactgaagtgctggcgagtaccggtctctcgcgcaacgcctcgaccgccaaggaccggaaggcgccctacgtgccgatcgtcatcgctgctccccctccgctgagacagaggagcaagcaagcgccgccgccgagcgcgctacctccgccacccggctaccggccgtcgccaaggacgccgccgaagagtcgtcctcttcggccctcggacgtttctcccatcgaccctccagcgccggcccattttcggtcttattctgcagcgacgtccatttctgacggcggccagacggtcgagcagtcgtcctttgacgacacaatcttccggccagcgcccgtcgtggctcaacgagttgggccaaaccacgcgcgaacggcctctgctggcggtgctcatgaccctcgttcgagattgcgactcggcgcttcctctgccgcttcagaggccacgctgcagcccttcaagcacaacccaccctcgtttgacctcaagtcgccggtcatcgcacctgaggctcctcggccacgtcctccgaggcaagacacgtttgcttcggtccctggccatcagcaagcgcgcgactccaagtacccagccttcaccgtccctggcttctctgagcagcagcggcttgccgagcagcgtcaagcggccggccgtgacgtctacccacgtatgcggcgctacgatgaggagctcgagttcttcgagggcgccgagcggggtccaatgacgctccctcggtgagtcgcttgtagcctcttcttcaggccgagagtatcgtcctgacctatcaatcttttctggtgcaggtccgacggtagctcggcagcgccatcaattgtcttgtcgccctcgccaaccagtccgcctcggctggcaccgacgaggtcagacgtacggccgccgccgacggtcacagcgcctgcgctcttgacttacggcgactcgcgccgaccgcaatcgcctcctcggccagaccttttgacgcagcatcaccgagtgaaggtgtgctgaccttactctgctgcataccattgcgagcgacgctgacctactgctccttgttcgtgcagagcctgggccgactcgatctgcccacacccttctcggcgtctggcgctcatcacaagcgcccgtcaaacgtgagcgagccctatcctcctggctgactgtcgttccgatcttgacgttatgtcgcctgtagatcaccctgccagcgccgctccgacccgacctttttcaaggcctcccgcggccgcagtcgcacgtcccgttcagccagagtagtactgccatcggccggcctgctgttgccgccggccgcagcacgttccacggccataatggctggccagggacaagcccgacaaaggaaggccatggagtggcagcgcagacacgcctgtcggtggggccgtgagtgagctctcgcagacttgcagctttcccagtgatgtgctgacgggcggcattcctcgtagcagcatcaccgtccgcccaccgacgcacctcggcgaggctgccatcaggccgcccgtgctccccatcactcaaccctctcccatgtcggctgcgctccttccggacccgatccggcccctgaccctgcggccaaggcagccgatgactggtttccctccagtgccgcccgtcccgccgaaagcggcctctcggcgtcagccttctggatcatctgtccccggccgcccatcgttcgagctgccgcctcccgctctcccgacggtcgcgcgcccgacgatggcccatctctttcgcgtgccaggtcggccggcgtcgaccccgccctccatcctacgtccgccggggcacgcgcatgtcgggccgcccggcctggcagctaccctcagcccacccgtcccgcccaaggatcgtcggccatcgccgccgcctctgcgcgcccgcagcccagctcagtcatccggcacgggctggcaatcggctcgagcgtcaacggtcaggtcaagcgactcggcttggcaaggcgagcacccgcgtcctgcccgactctcgccgtcgcacggccttggcagggctgcagccgacccgactgcgatccacctcccaccgtcgcggccatccagccgagctcgcacgccgtcgctcaaggagtctgtcatcggcgctggcgccggcccgaggctccggtcgcggccgccgaccaaccacggcgggacggtcgcgagcacgatcgaggaggtcgaggaggatcagacggaccggtcgaagcgcaagagccagccagcgcgagactaggcgcgcctaccgagcaggggttcttgtctttcgtatggcccatgaagagcactctatgccagcacgcccttggtcgacgggacgtcgttgccgcccgtgcgctcaatcgcctcgcggatcgccagcgcgagcgccttgaagctcgcctcggcactgtggcggggaggcagcttgacaagtcagcagggcagaagcaactggctcggcgccggagcggtgaggagaggcgcacatgtggtgattgttgacgccccggatcgagtcgacgtgaagagtgacgcccgcggcctgcgcaaacgactcaaagacgtgcgagatcatctcggtcgagactggacgcgagaagagggtcagctctaagcgcggctgcgctcggcgtctgtcgacatgtagacaagcgaacaaacgaacggtctccaatcttctcccgcgtgaacggcaggtggccacagaagtaagggcgggacgagatgtcaaggacggcgcgcgagagggcctagtcgaggcgagagtagggcgggagggatgacgccgtcagggcaggtcgctagaggaagagcccagagaagcagctgatgaacttacctcgtccagcggcgcaaagcccgtgccgtaccgcctgatgccccgccgctcgccgagcgcgagcttgaaggcctcgccgagggcgagcgcgcagtcctcggccgtgtggtggtcgtcaatgtgtacgtcgcccttgcagtggagcgtgagcgacatctggccgtgcttggccatggcgtgcagcatctgcagagagtgaatcggacaagcttacgtcagcactgctgaacgagggcgtctacagcggagacgaggactcgaggacggacgtggtcgaggaagccgatgccggtatcgaccgagattgtctggacatcgacacccggccgaacgtcgagcgcgatcgagcaaacaatgttggtctcgccagtcactcgggtgacggtcgcggcccggacagggtagccagccgaggcggcgcccgtgacggcagcgtcggggacggcggcggtcgtcgaaggagcggcagacatgtcggagaggggggttgctccaaaatgaaaggggggggaggggggggggggggggggaacgcacgatccttgatctcgacctggccgtccttctttgactggaagacgagcaccttatcctcgtcccggcgggtcggagggaagggcggcaggtcgatagccatcttgctagacgaacttgtgatgaatcgggcggcgagcgagatgggcgaggcagaggtcggcggcagtcggctgcgaacgaggtcggcggcgagacggctccggagcatgcctggcggcggcgaggcgagcagggcggcgacgattagaacgacgaggctcgcgaggacgacgcgcagcctctgtcccattccaccccgtccggacgtacaagagggagatagagttggtggaaagggggaaggggagatggagtcagagggacgcgtggaggatcgtaactgttggcagcgtgggtcggccgtttggtccggcgacctccgttgctcgggccggcctgcctcctcgctccttcgcctagctgagagctagtcgagctgtcggactagctggcaggctgggctcgtcttacagctgcctacgaagtaaacctatccacactcgaaaaggcaggcgggagggacagcaaccgacggcaggctcctgctgcgcggcctctttgccctccggccccgtcccctccgcgtccctctggccgctcgacctgcacccgtggaagactggcccgcccacggcctcggatcgcattccacgcctcgggatgcaagacggctacgacgctcgccagccaaggtagcggcggcgtgctcagctctcctctaacgacaacctcctccaacgtgccaacgatggccgacccgactgctgccgccgctaccgcctcgtccttctcccggccgctcgccttctctgaacgctacagcctgacaaggtgcgtgtcgccttctgactctgaacgactgcgagggctcaccctctccctcgacctattgcaggtcgctcgtcggcgcccctcctctgcccttcatcgcggccgtcctgcgcccacccgaggcttacgcccgggatcagctcgctcacgacgtccttgccgtcgttccgcttcttgcggcaacctaccccgtcctttttgccaagatcgacgacggccgttcgaggacgcccaggcttagcttccacgcgcgcttcgacccggtgaccgcgacgcacgcgctcgaagcgggcgggacgctcgacgccgcgttactcgagacgatggcgatcccggtcgacgtcgtcacaggcacgccgctctggcgcgtcttctatggctggctcgcctcgggcgagtgtctgcttggcatatcgatccagcacgcgatcgccgacggcgtggccgtcctcgaggtcaaccggacgctcgtcgagctctttaccgctgcggagggcaggccgtcgtcgtcgccaccgtcgtcagaggtggttgccctactctcgccgccagtcttgcatccgccgatcgaggcgcttatcaccgtcgctccaagctcgctcgcactcgtcggcgtcgcttaccgtgagctcttgctcccgcgccttccgtccctcctccggacgatcctcccctcgccgccgctcaagtgggccggcgccttgccggccgtcgcgccgcatcctcgggcaaagcggcatagaacgctcgctgtcggtcctgagcgattaacggacctgctcgccctctgccggaagcacgacgtcagcctgacgtcgttcctccatgcagcgatcgcgaggtcgcttcggcccgagacggcgggccggccgttcgagtcggagacgaacgtcaatgcccggcggctctttacggccgagcaagcagcaaccgttccctcggggacggggacgtacgtcggcgtcgtctatgccacctcgccagcgaccgctccgaccggcaccgacgccgccgacgccctttgggccgaagcccgcgcccactttgcaacgatgcgccggccagcggcctttgccgattcggtcaaggtttggggcatgcttgcttacgtcccagacaagccggccccaaacggctgggacgactttttcgcggccaagctcgtcgcgccaaagagcgctgcttttgagctctccaacctcggctcgacgaccttctcgtgcccgacgacgcgctcggtcggcgccgctgctggacagtctggctggctcctctcgcgcgcagtcttcagccagccgcctcagccgacgtcgcccgtctgcctcttctcggtcctcagctgcgagacgggtatggagatcgccgtcggctgggaagccggggttgcagaggtcgaccgagtgctagaccgactcgaggacgtgctggagatggttgagtagaaattgggcgcaggcaacccgggcctcgtgtctcgctttctggatgctcttactgctcagctccctcaagcgacgtcgaaaggagggactgaatggctacatggaattcgccgggcgaggagatgctacagtcgagaggaggcggccgctttgggaaggccgcagggggaacatatgtgcaagagttggccgaatggagtgcaaaagggcgatggccgatgatgggccgatggcgagacgctaaagcgcttatgaggcctctgtgaaaggaagaagtcaggctgtcagcgggcagtgctgcagatagttgaagcgcggaggacgaacggtagatagccggaccagccacaacatgcgcgttaaggagagatgtgttgtagggcgtgacgtagaggtccttgttggtgatgacgacgaacgaggtcccgttcacaagtgggtcgtccggcgtctcggggaagacggttccgttgggctggatggtcgtgcccgtgttgtcggacgtaagagtgagcggcgtgtaggtgacattgagctggctgagccaagcaacgaagagctgctgttgaaagagaagagaaggtggtcagcaggagggtttgaagagagttgtagaaggtcggtcatcccgcgactcacaggcgtttcggtgccgttgaccataacctcggcgccgacggcagccgtctggttgtaagggccagagacctggccgggagcgtcccagcggagctcaacctcgcggccgggagccgaaagcgccgtccggttgtgggtgagagccgagccgccctcggggtaaggcaggcgctggaaggcctcgtcgatgcccgagggcccgttgacgacggtcagggccgggaagatctgccacttgagcgggtcgttcgaggccgggcacgacttgatgtacggctgcagtagagtccaagcaaaggcctgcgggatgccgacctcgaaaaagacaggcatggggctagagagagagcaaggaaagggtacggggaaagggcaggagggaaagggcaggaaacggcagtgtcagtggcgcacaatcctcataaaaacagacaataagacgcacaacagtccagcgagttgtctgaaggccatctgctggcggctctctgttgtaatcgactggacgagcagctgagcggtcggccgggcggtgaggtgcgagaggaagccaaggacgcccgactcgccccagcgggtgagcttctggcagaagtcaactgtagagaaagaggcaaacggcgacggtcaggagctgagcgagtagagccgccgtccatcaacctaggctagcttgataaggtcgggaaggaggtgatgaccggtatgtaaacggtgaaaactcgtacgcactgaattcggggacggtcttaaagtcgtactggtactcgcagcgctgaggcgcgccagtcgtgttctcggccgagttgagcatgttggagatgagggtcgcatggccgacctgtcgtagcaagagtatcagtaactgaggttgagtgtatgcgaggcggcctgccgggacaaacctcctgctgggccataaacttgatgagcgaccgctgctcggcgttgatgccgtactcctcaaactcctcgtccgagaagcgctcgaggccgtactcgaagaggtcgagcctagaagaggagcagcaagaggtcagttaagtggctcgaaaaaggcgaaacaggaaagcaaggacgcactcgatccactcctggtgaagggcaagagcgagcgactggaagtcaaagtcgtccgcgggcgcgtagacgggcgcaggtgcagacgagtctgcaacaatgacaaaagaggtcagttctcctctgctgaacggttgagagaaggagggaacgcactggtgtcgacgccaccgacgggcggcggcggggccatcgacccgttgaggacgggtgcggccgacgcgaggagcgggagcgcgaggaggaacgcgttcgacagcatcttccaagaggtagatgatcgggaggaagggggttggtgggtggtgaggaaaggaagacagagagatcgagcgccgcccgttttgaagggcagtgatgactgcgggctccgcctcctcctccacaatcacgacggcttgtcgatccggctatcgtagcgtcatcttgccgtcggtgccggcctctctacggcatctagatcgggtctaaatggatggagctcgaggtcggggctgctgcgcgcgggctcgacgctgcgggtctgtcgtcgatgtcagcagacagcaacagccaaggacgacagctgcgacgacaggcagcgaggctgcttgcgagaagacgaaggcagggcagcttgatcagaggtacaggtaccagccggcctctcctcctccgtccatgtcggccgaagaaacggccggtcgacgtcagcatggtttcgaatcgagggctcggagcgaccggccggccgcagtctgcgggcgttgtagcgatcagcccagcgctcgagccgaatcgcctgaaggcagacagacctacatggcagagggacgtccctacctctcgccattcagctcgcgagcgtcttcgcttcggtacaataggaaacgagaggactggaggaaatagtccgtggctgccgccggaaggtccatcctggagtgtcggaggctaacttacgtaactaactcttgcctccgaacaccctccgcgcctctggctgctgcctgatcagcccaggtcgacctcgctcgcccacctcgacgagcatctctagcgcttacgccatgaacggactcgcccgactctctctccagcagctcgtccggacggcctcttcgcggccactggcggcggcggcggcggcggcggcgcccatcgcctcgacctcgaccctcgccttcagctcgaagcggtcggccggctcggtccggctgctgtcgacctcggccgtgcttgctggcaagggtcagggaggacgggaggtcaaggtcaagaagacgcccaaggccaaggagaactttgccaagggcagcaagggcaagtcgaaggcggtcgaggaggaggaggacgacgaggacgactttgactgggccgccggcggaggcaagaaggcgtcgaagcggacgaccgagccgaacgaggccgacgtgatcgaggccgaggtcgcaaaggccgaagacaagatgggcaaggccgttggctggttcgccgacaagtatggcgaaaatgtcgcccgggtccgcggccaggtctcgaccagttgcgtccagccgtagcggccagcccggtccctagtcgctcctcaggaatgactgacacgctctcgtcaactcggctataagcctcgctcgacagcgttcgcgtcatcatctcaaaggacgacggggaggtgccgatcaaccagctcggaaccgtcgccgtcaagggcaactcgcttgtcgtcgacgtcttcgacttggaggtgcgttcccactgctgctctctcgggagcgggaggcagtcgagccaggcctctcgctcttgaaccctccctcgttcgtgctgacccgttcccaccacgtcgctccctagcacacgaaggcgatcgagaatgcgatccacaaggccaacttgcgcggcctgagcccaaaccgggtcaacgctcgccagatccggatcgtcgtccccaagtacgtatctaccggggaacctcacatgtgtgggatgtaagctgactcgtctgcgcctcttcccagaccctccgacaaggatcgccaagagctcgttaagtcgatgacgaccctttcggagcaggccaagtcgacgatccgaacggcgcgggcggccggcgtcaaggcaacaggcaaggacggcacggccgacctccagacggtgacagagaagtacacgaagcagatcgacgagctgctcaagaaggcaaaggccgagctggccgagtagaatctgctaggatctcacgagcccctggaccgaacaaagtagctcttgagggcgctgatctaacgtgaaaaggggggcatgatatcgtgaaggatgagtctggagacggagggcggccgggaagggtgtggagcacagggagggaggcgctgcctcgctctattcgtcctcatcctcaacaacgacggccgggaggaagaacgtcaggacgcctccggcccgatcgacgtcgccaatgtagaggtagaggatgagcgaatggccggcgcagacgcaggcgatcgtcgagccgacgagcgtgtgggccgtcaggaagcggaggagcgagcggagggcgacgtgcgtcgtaaaaaagcggttgccagcggcactcgcggggaggtcgagggcgtcggaggagtcgggttcaggggcgtcggccactgccgatggagagattgaaaggttctcgaagggtcagtagcgctcagggccgggctgcatgcaggcttgagacgcgaccaggtaacgcaccttttgggaccttgagccctttccactcggtcgcgacctcgacacccttcccttcacccctcccggcaacgagtcggaacgtcccgagcccgttgcccgaagctgcggcgctgacggcgacatgcgaagcgagaggctcgagatgccgggcgatcgtccgcagaagcgagaggggtgggaggagaatgtggatctgcgagtcgtcgagcgcagagcgagagaggagtcgaagggaatcaacgacgcgtcttcgagagccggtcgacgtgagtcagtacgaacatcggggtcgggacagagcggctcgatgagggcggcgacctcgggcggcttgagcacacggatcgggagttcgtgggcgagcggcggcgggcgacctgcgtgcgagcgaagggggagtgatgggtcagtgacaacgaggagtttcgcaggaaagaagagagtcgcaccttcgggtggcacatgacctggggatgagaagagctcgatcagcgaggggaagcttctcgcaaagctcatggcgaggtgcgcgtccggccttctcaactgctaatttcgccgtggggaggctcagactgaccactgtcgctcgtctgttgtcctgaccttcttcccccgggatcgcaggcccgactgccagcacctcctcccgcgcttcctcgacgacccctcgattcctcgcctccagcgcctgtcgacgctcgctcacctccttccctccgcatcgacttatcagctgtcgctcgtccaaacgtacctcacgacgacctccactccgttctcctctcccgatgcggttgccggcgccggccggcccgccccgagcgccctttcgcgcaagctcgcggtcaaagtcgccggccggctcggcgttcgggcgctcatgcttgccggccggcgcgagcggggcgggcgccgggcgcttgctgggctcagccaggggggagggggtgccgctggaaggcatggggagaaggaggaggagggaggagaagaggtgggcggggaggtcgaggaggtgattgaaagtctgctggaggggctcgaggacaaggttcggcggtctcgccactttcctctccctcgtttccgcattatcgactgaccactcccggcctcttgctcggcccctcttacaggacacgattgtccgctggtcatctgcaaaatatctcgcccggctctgcgcgctcctcccggcgtcgtacgcccgccagctggtagaggccgtcatcgagctcttcgggcgcgatgtcctccctgccgacgaggccgaactcgacagcggcggggatgggacgggcagtcggaggccgcagcggcccgacatcagcgccgtcaaagagggcgcctggcacggggcgtgtcttgccgtcgccgagcttttgcggcgtggcgtgctcgacgacgatctcctgtcggacgtcgtcccgtggctcatccaagtgcgtcccttcctcacttcgtcccttctctcctcgtccagtcccgctgaccgaccgcgcacgcacgacgagaaggccacgacgtttgacccttcgagcacgacccactcaaccggcacggccgtccgcgatgccgctttttatgccctctggtcgctcgcccgctgctttaccgccgagcaggtccggccctgggcggccgagattgcgtgcgcctgcgtcggggcgagcgtgtgcgatcgcgaggttgggatacggcgcagtggaagcgcggcgttccaggagggcgtcgggcgactcgtacgtcgcacgcctcagctcgctcctgccactcttcccgcacaggctgacgcttcgctcgcccctggctcgctcctcggtcaatcagggcgtctaccccgaagggatcgacgtcctctccaagaccgacttctacgcgatcggcatccgccgctcggcctttctcgctgtcgcgccccaagtcgcccagcacacgctgtacaggacctacctcctcgagcgctacgcgggcgagacgctcaggcattgggaccgcgaggtgcgggggctggcggccggggcgctgagggcgattgcggagctcgacctcgaggcgatcggcccggcgctggggcgcaggctggtcagttcgctttctgtcttcaccttcgaagagattcgagcactaaacggcctggcctgttttcagcgcgaggacgcccagaggacgctcgacggcacgtggacgcacggcctcgtcctcgccctcggccagctggccgaggcttgggaacgggccgactcgccgttcgccgttgacgagcggcgcaaggtacgtcgagaccagcccagtctactccaagctgcctgcggctgactcccagctcatcgacccttagctcttggagacgatcaccctcctccgaccgcagctcttcacttcgttctcggccgacctccaccttgccgcggcatgcgacctcatcgcccactcgctctcgcccgccgcgctcgcggaagaaaaaattgataaagcgtggcggaacgttgtcgggctcggcctcaggagccgtaagcctgaagtgtgggaggcggtcggtcgggtctgggctaaagtcagcgagctgacagacgtcagcgacgacgtcgcaagatgagtcgctccgtcgcaccgttcttgcgagcgccagaaaagtctgacatcagctctttcctgctcggcctcacgcttctcgcccagctcaagacgttcaacgccacgacgcagcaggcgcttgccaaagtccttggcagcctccgcttcagccacacgggaggctgcggcgaagtcgtccggcgcctgctcgggctcgtcgaggtcggcgtgcgttcctgctccgctccccttagatgtccctcccttcggtcactgacagccataaattgcgaccgccggccccatgcagtcaaaagactttgtgttggacgtcgaggcgcggcgaaatgcgttccaagcggtgtgcaccattgctgccgacccgctgaaccggttcgaaggccagtgtgagtcccgtcaaagccacttgaaccatcacgaccgcctcgtagctaacccgatgcgctcctttctccgcctcaggccttggcagagccgatctcggccggatcaccgccgctctcctcaagggcctcgatgactacacctcggaccagcgaggagacgtcgggtcgtggatccggctcgcctgcctacgcggctcatccgagctcgtcgcctcgatcctgggggaacctgatgctgagcgctggctggccgtcgacgagtaccgcgaggtgctcggcaagatgctcaagctcgccgtcgagcggatcgacggtgtccggcgcggggcgggcgaggcgcttcggacggtcgtcctgctcaacggcggtgagtgtgacaacgagccgcgaaaggttcacgctttgcccggtgcggcggacctttgcgcgctgtttgcggcgtcggacgctgtgcgctggaacgaggcctcgtcggtgattgcccggctcgtgccgctaatggcctatcagccttaccggaggccgctcctcgagggcctttcgctgagcatcggcagcctttcggaaggcacagtaagcttctgttggccccattgaggcacgtcgatgttcggctgacgaatctcccggtccgacctcgccagtccaagcccgcgtcagccgccttcctccagtttatctcgacactcccgccctctgcgctctccccgagcgaaccctcgcttctctcaatcagccgctcgctcgtcgacattgcctcggccaacgtcacgctcaaccgcgtctttatcccggtgctcgacacgctcgtcctcctgtttgaggacagcgacctcgcgcggctcgccgggacgccgtccggcaagatggcgtgcgtgcatcttcgttcgtttctcgcaacaagtggaccggctgacgggcctcgatgtcgtccgcccctcttagcgtgcggtccatcttccagacggcgacgaaggacctgggccgaattcgcaacatccagcgcgtgcaggcctcgatgaagatgtgcgtcgtccggcctctgcatctgctcggtctctcttgactgacgacgccctcattccgatggctgctgctccctcagcattactggcatgctcgcgatcccggcctgctcgaccgacgccgtcaagcacctgccgatcctgctcaaccatcgtttcccggtcgtgcgtcgccctgcggttgctgccatcgccatctctctaaccgctgacaggctccgccacttcagatccggtcggcgacggccgagcagctctacctcgccctccagtcgatggacgtcgagggcgccgaagagctcgaggatacactcctcgagacgacctggtccgtctgcccgagcgtcaaagccactaccctgcgctgaccaagtctctacctcgcgccacgcaggaccgcggacgatgtctcgaccgagaccaagacggtctgccgcctcttgcgagcccatttgcgagaatgaccgatcgatcggtccctactgctttttgagccagcgccgggcctcggcgtcgtctggcccgtcgagcagcggcaggagcgccttgcggcagagctcgttgtggtccttgagccacttgcgctcgaccggggcgagcaggtcaaagttgacgagattcgtcgcgatcggcacctgatgggcgggggtgagggctctcgtgtcagtgccctgatcgggccagccgtctttgcaagaagaaggggccgcacccgcgtcagaacctcccaaccgagccaggccggcttgccgtcggtcgactgctcaagctcgacgcagaggatcgcgctctcgatccgcatcccccaggcgccctcccggtagtagccgggctcgcatgtgacaacgtggccgctggcagaagacagtcgctcaagaaaggtcagccgaggcagagaccgaggagcgggtcgggacccagcgagggacgcacggcttcagagggtaggcgttgccggcgccgatgccctcgggcccttcgtggacgccgccaaaagcaccgatgccgtgcccgacgccgtgcccaaagtcgagccgggcctgccagaggggcgcacgggcgagcgtgttgaagtcctggcctccgtgaccctcggggaagacggcccggatgacggccaggtggccctggaggacgcgcgtgtaggccgccttctgatcggtcgtcggcttcccaaagtgcagcgtccgggtcgtgtcgatcgtgccgtcgcggtacctttgcacagcagacgagagtctccgtcagccgtgtgcgacccttctcagagcaaagacatcagggcgcactgaggcccagagtcgttgacgtagggcgtctcgcggtcaatcacccggcagtggccagccttgggctcgtagtgcggaagggctccgttcgggccagagccggaaatgtcgccgtaggccggccctcggtaatgcttctcccgctggcgatacgaggtgtgaagcacgctgcgaggggcgacagcgcacagaagatcagttcggcatgcggtgacaggaagcgtctggaagaacacgcacgtcgcctcgtattcgtcgacccgcttaccctcctgcctgatgagagtctccatccgagccatccagctgtagagcgagtcgggctgtcagtgctgtttcgacttgacaaggagagaccggcctccttaccgcacggtcgcccggccgtcgcgcaggtaggccgccttgaagccggcaatctcggcctcattcttgattgctttcgcctcggtgataggcgagagtacgcttcggatgttgtcctgtgagccgattgagtgggtcaggacgagcggcagagggcgcgctgctcgacaggacgcaccttgccgagggccagctggacagcccacgagatgctgaggccggtgcagatcttgttcgcgggcttcttcttttctgccaccgccagatctcccttgacgacctcagtcagaaagtcccagacctcgtcgtaaggtcggacctcgaggctgagggtctgtaggtaggcctctgcctcggtcgagatcttcctggggtcgatgaagagggtgcgctggctggcacggatgctgtttttttcgtcggcaaaaggcacccacctggcagcgaagggtggacttgaggatcagtagagacctgttgagtcgatgtggccaacggactcacaagtaggcgtagaagacgggcgtcatcgggacgtcgtcgaagccacgcaggttgagcagccaggcaatctcgtccagggctgagacgagcatgcccgaggcacgaacgccggcatccttgaatgtaggggcgctggcgagctcctctagcttgacggcggcccgcttgcctgaaagtcaatagtcagcgagcgcgcccttcgtccaatgagctgcgcggctgagagacccagctcgtcgactcaccggcaaactcgagcgggtgcagctcaatcaacgaggtcgaccgcgccggtttgtcaatccagacctcatcgacaaggttgcgcttgatcgggacgatggtgaggtgctcggccgcgagcaagggagcgaccgaggctgcggccgatcacaaagagctcggtcaggccggaaccgggacgggcgagagctcgagcgactcacccgagtgcgcgcctcctgctccagaagagatcagtcgggggtcgataccgacgcgaatcatctcgtcggtcgactggatgacagcagcgtcagttggcctgcttgcgcggtcagatcctggtcaggaggcaatgcgaacacactgcgaggaggtcggccgcccagctgccctgcttgccgtcgccggcgcgcttgaccgaccagtcccgggagacctgctgcggcgcctgacaccagtagcgactgtccacgtagaggctggcggccgagcggctgacgagggccgtgcctgcgctgcccgagaagccggtcaggaacctcagcctccggtctgccggcgacgggtactcggacaggtgctcgtcctctgagggaacaacgtagacgtcgactttgtggtcattgagaagctgcctgagctcagcgagagcaatcttcctcgctgctgaatcgtcgccgagtgccgacgtcgtcgacagtgggaggccggtcggcagccgaagctgggggtcggcaagagctcgcttctcgtgtcgccgctcgtcgtcgtcgtcgtcttggacccagcgggcggccttcttggaggagggcaagcagaagaccatgctgaagaattccggagggaatggaaatggtttggaggtgaagggtgagatggatggagaacgtcgaggtcaccgctagggaaggggtcgcgtgtgtcggcgtctctcgcccgtcggacgaggccgttgcgcgcagcactctctcgcgcgcctcttgcaacaacagtcgctggccgagcgtgtctgtcaaaaaaaaagcgccatgtcttggctgggatctaccgctaccaaaaacaaaacagatggagggaagtcgtagtgatggtgatgacatggagcccggccgggctgcatagagatgtgaaagggaaagcgcgtgaagggggcgttgctggtttggggggtcgtcaaggagaggaggggaatcccgaggggggtcggtatgttgcagagaggtagagagcagtgggagcaaattaaggagaaggtgcaggtgatttgcttagggtaaggacgacgccccctgactgggccggttaccgtgccggaaggcaaacgtcgtcgagtgcgagccgcggttcatcgtcgtgatgccggccgagcccacgagaccgatcagtatctcgtatgctccccctctcgctcgccatcccccgccgggaaggcacccgccagctcgccgatcgagagacgcacgaccggcgcaggcgtcaggaagcgcttctcattcgcgtacgatttctgggcggcgagggggtagaaaaggtcgagcttgacgatcgcgggcgccgcggaggcgtcgaacagtggtgggtctgaggaggacgccccaccgccgctgctgccggggagtatgacgagatggcgctcgaggacgtgctcgagcatcgggcggatggactcgtctgttagggccattggggcttggtggggctcgacggccgactgcgcctgggcctgagcctggaagatggggtcgtccgcggcgggatggagcatgtaggccgaggaggacgatgttgctgttgcatgcacgtaggactcgtgctgctgctgctgctgaagattccggtcgacatcgaccaccggaccgaggccagtcgacgtcgacgtgccagcgacgtctgactccggtcggcccttgcgcttcgacgtctgcaccccctccagatgcgaagcagcagcaacggccggcgacgggtcccagcgcgtgtccatctcgctgccgctgtcgttgtatgcgcgtgtggcggccgcgagcgcctgcgcgtacgagagctcggccggggccggaccgctcgtcattgttggtcggtcgtcgtacggctcgatttggaccgcctcgccgccggctagatgggccatgccaaggtcagaaggcggctcggtggggtaaaagaacgggacgccttcgacggcggcagcggcggcactccggttgggtgccggctgctgctgctgctgctgttgctgctgcgggagccagatcaggccgccttcgtcttcggccacgctgtcctcgctctcgccagccggcggatcgcgctcataagcgagcgcacggcccgaaccggtctcgtcgtcgtcttcgtcggcggtggtggtggcggcgaaggatgagttgagcgacggctgctggtgggaggggtcggccgatgggtggcttggtgggggctggcggtggccgcctgagatggcgttgagaaggagatcaaggccttcggactgatagcgggcatggatcggatgtcagcctggcaggccttgctggaggagaaggcgacggacctggtcgtgctgcgggtcggccatcgtctgcccgctgctggatgctgcgtcggagaggggtgagggagcggagagcgagcgtgagaacgagaggtcggcgcacgcggtctgaaaaaaaaagaaaaggtcgaggcgattccacgcacgcacctcgccgccatcttccctccctctcgtcacccacccattctctcgctcctccctcatgcccgtctctctagcaccctcttcggcaggttggtccctcggttgcctgctccgcctttacagccgcattgactgacagaccgccccttacgacagccggcctgctcgccctgctcgacgagcccgagcctgagcttcagcagctcgcgctcgagcagctcgacagcgtcctcggcgccttctggccggaaatctcggagcacatcgtcgccatgtcagtctcccttctcctcttgcgctcagtctggtgactcgccgactctgggagggcacgaggtcgtagcggtgtcactcttcatcatcatgatcgcatcggggctgacctccccctccccctccttcgccacccttcctcagcgagacgctctccgagtccctctcgctcccttccgaaacacgcgagctcgccgctctcgtcggcgcaaagctctactttcacctcggcgccgaggccgaggcgctccggctcgcccttcgcgccggcccgcgcttcgagcacgagcggcttgccgtcgtcgagggcaaggggaaggggaacgagggcttcgtagaggtcattacggccaaggcactcgattcgtacattgcccttcgatgcgcttcgtcaaaggccgacgcatcgacatcgagctcgacctcgtcgtcagctcaggagacggctgcgcttgagtcaatcctcctctcgatcgtccgcgccgcgcttgccaagggcgagagccggcatgcgctcggccttgcgctcgaagcaaggcgaacggatctcgtcaggctcgtctgggacgaccagggacgcgatggggcgctcttgaggtggatgcttgagcaggttgggaatgctgggaggggcgcgggcggaagggcgttccgtgtcgaggtgcgtctcttcccctttctctctcttgggttatcggatcgggggtcgctgattggctttcccttcgcgtgcatcaggtcctcgaactactgctcgagctcattccactctccgccccgagctcctcctctacctctgccgcaagcgaaatcgactacccctcgctcctccaaatccacctctacctcaaccggccctctctctcatccgctcttctgtcggacctgctcggtccggccggcgacggcgccgacgagcgcaagcggctctgggcgtaccaggtcggctttgaccttgcggagggcgcgacgcaagagttccttgggcaggttgcggctgggctctttggcgatgcgccagcagacgagagcgtgcgttacctcctcgagccgaccgacccctttgacgcctttgcgccttgagctgatcacccgccgaccatcccatctgtcaggagcccgaggtccgccaaaatatgcgccgcatcctgagcggcgagatgagcatccggctcaacctcgacttcctctacaagaacgaccgcaaggacctgctcgtgctcaagacgacaaaggtgcggctctcgctttcgttcttgttgcacgtcctcgaccgctgacgcagccctcacgacttgcaggacgccctcgagtcgcgctcgtcaatgtatcactctgcgctcacgctctcgcacgctttcatgtcggccggcacgacctcggatgccttcctccggcagaacctcgactttctctcgcgcgccaacaattggtcgaagttcaccgcaacgtctgccctcggcgttatcaacaagggctcgctctcgcgcggccggaccctcctcgggccgtacctgccgcaggcgggtggctcgtctggccccggccagcagggcaaggagtttagcgagggtggagcgctgttcgccgtcggccttgtgaatgccggacggggcggcgaggagtgcgagtggcttgtcgggcagatgaaggccgcagaggacgaggtcgttaagcatggcgccgcgctcgggcttggtgtcgcgggcatggcgagcggcagcgagggtgggtcgccccctctacctcttccacgcgagtctgctttccgactgaccacgacgactgccccttgcccttgcccctcagaaatctacgacatcctccgcgagacgctcttccaagattctgccgtcgccggcgaggcctcgggttacgccatgggcctcgtcatgctcggctcgggctcgacgaggtgtttcgacgagatgatccagtacgcgcacgagacgcagcacgagaagattatccggggcttggcgctcggtatggcgttcctttggtacgggaaggaggaggaggccgacccgtgcattgcgcggctctcgaaggataaggtgcgcccgcttgcaaactctcgccgcctgccctgcggcacccgattgacacgtgcgctttctcgctctatttgcaggacgccatcctacgctacggcgcgatgtacacgattgcgctcgcctatgccggcacgtcgaacaacgctgcgattcgccagctgcttgacgtcgccgtctcggacgtctcggacgacgtccggcgcgcggccgtcagcgccctcggctttgtcctctgccggagccccggccaggtcccaaggatcgtccagctcttgagcgagagctacaacccgcacgtccggcagggcgcggccgtcgcgctcggcgtcgcctgtgccggtaccggccttcaggtgcgtgccccacaaactactcgcgatgctgtcttccgagccctcctgacatcttcctcttccccacccccattcgcaggaggctgtcgagctgcttgagcccatgaccaaggacccggtcgactttgtccgccaagcggccctgatgtcgctcgcgatggtcctcatccagcagtcggccgctcagaacccagccgtcacctctgtccgccagaagtttgccgccgtcatcgccgacaagcacgaagactcgatggcgaaatttggcgccgcacttgcgcagggcatcattgacgccggcggacggaacgtcacggtctcgctcctcggcagaaacggaatgaagtcgatgaatgcggtcgtcggcatggcgctcttctgccaattctggtactggttcccgctcgctcactgcctcagcctcggcttcgcaccgacggccttgatcgggcttgacaaggacctcaaggtgcgtcctccgcctttctctctcgccatcgcccctctgcccagccgcgctgacccgcccctgcctgcttctcccgcacgcgccagatccccaagttcgagttcgtctcgaaggcccgtccctcgctctatgcctacccgccggcgctcaaggtcgagaagaaggaggaggccaagccggttgcgacggccgtcctgtcgacgacggccaaggcgaacgcccgagcgcaagagaagaagaaggagaaggagggcgaggcgatggacacggtcagttttcgcccttgcccttgctgggctgatgtgcgctgcggtggactgacagccgcgctcgacccccgactgaccgaccgcaggacgacgctgtcgagatcaaggaggcggccgagaagatggacgaggacgcgaccgaggctaccccgctgctcgactcaaccgatgcgacggccgctcctggtgctggcaagcctgccgccgctactgccgccggctcgtcgaagaaggtcgccgagccgacggccgagacgctccccaacatgtcacgcgttacgcctgcccaagcgtccgtcattaccttcccggcgggctcggcgttcctccctatcagggcagacgcgacgggcgctaccccttcctctaccttttcggcggcggtggtggggagtcgcgcaggagggcgcgcaacgaccgctggcatcctcctcgtcgcgcggaacgaggcgggcgacaagacgggcttcgaccaggccgaagagtacatcgagctcgagaagagcctcgatgcggtcgggccggcggtcgtcgctgcgcctgttgctgctgctgctgccgcggcggggggcgacgttgagatgggcgctgctggggagagtgcggcgccggctgaggatgacgcgcctgagcgggatccgccggcgccgttcgagtacccgttcaacggccactagacgtcgcgtcgaatgaagatgcgctgttttcgctaaacgagggctgctggccggtcggtcgaccgctcgtcactagctgacctcgccgggccgcttcagaaggagttgggacatttgtcgcaggtcgttccatcagatagcgcaacggcatacgacagctggcgccgaccgcgccattcaagtacctcgctagaggacggacgcgagtcagacccgaggtcagctctctgcccgacggcgctaaggcacgactcgacctgcctgaaggaagaaggggacggaaagagggggacggaagcgcgaagcgctcgccagccgtcggacgtgcgacttggtggacgaggggaaggcggatgggcgacgagggggtgaaaaagggggtggggttgaaagattgggcgctggcgctcgccggcggtggagggcgagctgggagtgggagaggtgaagagggaggcagggagagagaggaacgaggggaagatcaactggggcatgcattgtcgtcgtcgtcgtcgttggccgttcgatcggcaagatggagcatcctcgagtccaagaagcgagcgggcaggtgtcgggcttcggcctgaggccggtgtggagcagaccttttgtggtcgacacggtccatggtgggatgggcggccaaggtggtggggacaggcaacggtcggctagcaagcgacggcgtaggtttgagagaggagggaggcaggtccaaggaagactgaaagatgtgcaagcggcgcttcacgagggcggcggcagaggcagagggattgaccgaccgccggaggaggaggaggtgggagggccgcatcgttgctgcgggacgttggaagagggtcgtcaggagggacgacatgcgctggtgtagggttcaggaggcgagactggaaggagagagatgggttcagcccgagcgagcgagcccttcaaaagcgtcagctcaaacgaccagtgcggccagggccagcggacgaggtcagccgacaagcatgattagggggagaggcgccgaaagcagccgggacgaaggggtcggctgtcggctggtcgttggcgcaggcggcgaggctggtcgggccggatgggccgcggagggcgggtcaacgggctgggccggtttctccggccgagcaaagaaagacgggcaggagcagcagcagcgtcagagcgacggccgcgctgatcgaggtcaggccagttgagccggctgacgtgctgctgatcgctggctggctgccgtccttgctttcagccctcgactcttcgctccctccgagatggccgctgctgctgcgcatccatcctcctccttcgtcccggcccgttccttctctccttgccaacggtcactcccctccgaccaaggcaacgatggcccaaggccagcccaacgcccacgcctcatcttccaaacccacctcaacctccctcgccccttcccctctgaccgcctcgcacgccccacgccccgcgtcaagtgctaggccgcttgaccaagccctcgcgtccctcgccgagctcttcgctctcgaagcggccgcccaggaccaccggtcgctctcgcggcgcaaagcacctatagcaggacctggagtcgcagcggcgtgcgtggcctgtcgcgaacggaaggccgtacgtccccctcccttctctctctctctctcgcgcgcctctcgcattcccctcttcccgcaagagtacacgaatggctgacagctcttgcgctcggtcgccgtctcctcgtagaaatgcccagggacggcacccggccgggaagactgcccgcggtgcatggcaagagggctcgtctgcgtctggcccgagctcggcgtccgggggccgaagcgcggcttgacaaagtgactcgtcccgctcggtcgcctggatgacgccgtcgaggatgaggacgttgccgtacgtctcggactcaaagacgaggacgtcctggaagagcgacttctcggtgtgcaggatctgcttgaccctggcgggcgacaggcggaagaagcggagacggtcagcgcctggtctccagctcacagcggagggcttcgagctgaactcacttgagcatcatggcctggcctagagaagcaagtcaggacagatggggagtcagcacaccgctcagcagtagcggttgctcaggccctttggcaaggccgactaaccgggccactgcgaagaaatctcgcggaaccatccgtctgcgtgagggagggcagaaggtcagcaggaagctctgtgagaagggctgccgagagccaaggactgaccgacgatagaagggtgcgaaagaggggcagacatggtgaaggagtgagtttggaaggttacggttgagaggagaagcgcgcagggtcgaagctcgacttcttcagcccagcaggagaggcgcgtgggcggagcgagcgagccgaaattcgacggcgccggaaagtaaaaaaggtactacttttgccccgccgtcggatggtacgaatgaagatctttccgacctgttgcgcgcatggaaggggagaccagctgcaggggtgccttactggttgagagcagaactctgcggcagaagtccgacctcgctcggatcagcgcgaccgcgcatcgctggcgggtgagggcagatgagcaggtcaaccagggtagagaacgggcgggcagctctctttgtcagcgacgagctggggtcagcatgtaagagcgagtgtgggcaggtactctcacgtcggccgtgcttgagtctgtgaggggcgggacgagtgatggccgtggtcccgcgggccagcttgcgcgcgaggccgagctgagcggcgcgaaaactgctgggaaagggcacacagttcggccacgaagagcaggacagtcagctctgtacgtggccagtgggacgtgatcgaaggcccatcgaacgaggcgtgattgaggcgagccgttggacgtcgggtatgctgcgcgagagagccggcggaaggcagcgtcggagggccggccgaggaggaggagaaggctgcccttgatcttcacacccatctggtcgacccgttgcttcggatgctgcagcagagggtcgatcttcagtaatacgacggtcaatcagctgtcagcaacgagggcaacgccctgcttctggccgtgaggccggcgtcggtcaaccggcaacgaagcggtcgccgacgcctgctgatggtcagccttcgaccgctccgatgcccaccggccggtcttcagcccgcgggcgagagcgcgagattagtcttctcctgatggcggtcagcttgattctggcgaggtggtcgtcgaggaccagcgagcgatgcccctctgccgaggcggctgcgcagctcgccctttcatgcctccctcgccatctccgaccggtcaccctctccttctcatcggtacgacacgcctggcagacctgaagcatgtcgaggtaagtaccacatcgcgtcgaccggaagcgcgagggcctgccggttggcgacccagctggttcaaccaaagctgacctcgaccctcctttccttccattcgcagcgctcccgtcacccgtgagcaggctattaacgcctcgacccagaccttcatctcggccctcgtcctcaactctgccatcgctggaggcttcctgttcgccttcaccgttgtccggcgctcggttcggtcgatctacgagccacggacgttcgtccccgccgacgagaggtacgtgacgtgtccccgactcacgcgtcgtcccttcgaccggccgaactcacgctgtttccctgcgacgacagcaaacgcgcccctctgttctcttcgtcgctcctcggctggccgcttgcgctgtggaaggtcgacccgaggctcgtgctcgaccgctacgacgccatcgacgcctacgtcttcctccgcttcctccgcatgatcgctcgcatcctcgtccccgtctggctcctcagctgggccatcctgatgccagtcgacgcagtcgggacgagcaatgccgggaatgagggtctcgaccgcttcacgtttggcaacatcggcccgaccgaccaggcccgctacgccgcccacctcgtcctgctgtacgtcttcaccggtgcgttgcctcgctctcttcgctctgtctcaccggcaggctgatttacctttaacttcgtattggccagtctggatcctctacaacctctgggtcgagatgcggcactggctggtcctccgccagcgccacctgatctcggacgcgcactctcggctgccgcaggcccgcaccgtcctcttcaccggcgtcccgcagcagtgtgagtctcgtgcgtcgacctcctatcttctctccccggatgctgaccatttatgctgcccgacgcagaccttgacgaggctcggctcaagcagctcttcacgcacatccccggcggggcagagcacatctggctcaaccggtgagcctcgacggtttctcaagtcgcggtagcgctcccagctctgactcggtcggcgcctgcaggaacctcggaaatatgcccgacgacttcaacgcccggctggaggcatcgcagcggcttgaggcggcgaccgtcgcgctcatccggacggcggacaagctgcgccggaaggctgagaaggcggcgagcaagaaaggcgcgccgccgctcgacgacaggtggacgacgacgccgacgccggccgaagccgagtcggagctgacggtggccgagcggctcgtcccgccgtcgaagcggccacatcaccgactgcggacaccggcctggctgccgttcggcctgccgtttgtcggcaagaaggttgacacaatcgtttggtgccgcgagcagattgccgagcgcgatgcgagccttcgggcaaagcgagagcagctcgcggaggacatcagcacgcctggcaccggcgcggccgagacgtacccgccactcaactcggcctttgtcctcttccgccagcaaattggggcgcacctcgcctaccgggcagccgtgcaccatgcgccgtacctgatgcacgagcgctttatcgagacggctccagaggacgtcatttgggcgaacctcaacatcaacccgtgcgtcgatcgccctgtcgagcgtcggtcgccctcgcgtctgacgcgctcgcggcctgtaggtacgaccgcgcgatccgcaggctcgtctcggccgctgcgaccgctgccgtcatcatcttctgggccattccggttgcctttgtcggcgctgtcagcaacgtgccgaacctctgccggacttactcatggcttacttggctgtgcgacctgccgacgccggtgccgggcatcatctctggcatccttcctccggctcttctcgccctcctcttcatggcgctgccggtcatctttcgtcgtaagtttgcccggtgacaggtcgcgtctgaacgcgctgaccccttcgattgcgctgatgtccagtctttgctcggtacgagggcgtgccaaagttgacggcggttgagctctcgctcatgacgcgctactttgctttcctcgtcatcgtgcgcccggtctctatctgtctcccttgcaggcggcgtagctgacctgctgaaccttcttcttcgccctgcagcaaggcttcatcgtggtcaccctctcgagcggcatcatcgtgcgcctgaattgcgatccggtcaagccggcgccagctgtcatccgcctgaccctccctccgtctctgatgcgcagaactcgctcccggacctggctgaacggcccggctcgtttgcaacgtcgcttgcggccaacttgcccggagcgtcgaccttcttcctgactttcgttacgctgcgcgggctcgcgggctcggccggcatcttcatacagtacagcgagctcgctgccttctacgccaagctcttccttctcgggagcacgccacgggccgtttaccgcatccgcttcggcatgcgctcggttcagtgggggaccgtcttccccgacacgacgctgctcgtcgtcatcagtgcgtgggcgcgtctgctcttgtcacaccacctcaagaccctgaccaacgttcgcctctgcccctcagcgattgcttactcagtcatctcaccgatcatcaacggcctcgcctgcgtcgcattcatcctcctctattttgcgcacaagtacctgtttgtttgggtcgtcgaccagccggcttgggccgagacgggcggtctcttctttccaaaggcggtcgaccacgtctttgtcggcctctacctcgagcagatctgcctcgcaacgcttttcttcctcgctcgggacgagaacggacaggtgagtcggtattgcttgcagtggggccacttgccgtggctgacggagtttcgttccacctctttgcaggtctcggccattcctcagggtgtcctcaccgtcgtcctgctggtcgcgacggtcagttggctcgctcgtcgtcgagcacgacttcttgtgctgatcacgcatgacactaggccgtctttcactacattctccacgactcgtttggaccactcaaggaggccctgccgttgacgctcgctcaccggtcctttggcatgcctgtcgaggccggacatgacgcgtccgatctcgagttcgacgacgtccgcaccgctgagccatttgccaagctgcacggcaaactgctccgccgccggtccagcgtccgagcacacggcgacgtcgatggcgagggcgaaagcgagggcgagcgtgagagcggcacggcaggcggcgcacccggcgccgcactcgagcccgaggagacggcggcgcgcgcgcggcaggccatgctcgcggccttcacccatccggccgcccgagtcgagcagcagacagtctggctcccgtacgaccggctaggtgtcggtgaggatgccgttcggcggtacggggaggcgggagtccgggcgtcaacgcagggcgcaaccctgaacgaacgcagcaaggtccaggtcgaagaagggccgccggacccggaccagcaggtggtctaatcgcgccgtcggtcgctgccgtcttctctaccatctcttccactcacgacctgtcaacgacttgacacgaatgatcagcatccctctcgtcctctcctctccgccacaaacgaaatgcagcctccatgcactccccctttcacgatgactttcgacgaccttttcaagaacaagagcgagtcatcgtgtatactgcagctcgatcctggcttgagagaagcgcgtcacctgaccatcgcgcggacattcggcggttgtggcgaagtctgttcggccttgaggccgcttgctgcagctgctgctaactgaatggaagcgccacttggcctgggcgactgcacgatgtgctcgacaatgtagcggaaggccggtttcctttttgaccgcgcgcgcgagcagccggtcagcttgaagtgagactggggagaagagagagggagagtgacgcacgggatgcacggctcgatgccgtcgcagaaggtgctccgccgaagcgaggtgcagaggaggtcgatgtcgatgtcgtcctttgagacgtcgggtgcggccgccttgatctcgcgccagatgccgcgaagcggaagtcggggcggcggcggcaactaaggtgggcgcagagacgtatcagctctgcaaagtagagcgtcggtcggagacgcggcgacgcaccagctgcgtgccgtgattccagtagcgcgggccgaggagcccctggaggttgtcgtcgtcgatcggcgagtcgtcggtcggctcgggcatccagttctcgctgtccgtcgagctcggccgcgaggaccgacgctggtcgctcccgtccgcttcgtccccgagcggcgagcgcagcggtggcgaggccgattgggtatgctcaacctttagccggtcggctggcatctgggctgccgctgctagagaattggcggaataccaggtcgatgcggaaattgcacgccagccttcgccggcagcggcgatccgtacgcggtacggctcgtaccgctcgcgcaaccggaggaggtgcatctcctcgtcggcccgccggcggctgtcatctggcatccgacgctcgctcggaggtatcgccggtcggatcgaatgcgcgtcgatgatttcttggagaccgtcgcgctcagcggcgcctgcagagtgagaaagcgatggaaggggaggccgaggggaggtcgaacctgacggtaatgtctgctcgtcatctggcggctcgagcggcttcaacacgcgtcgcagctgttgcgccgtcaagagacgactagactgcgtcagcacgcgaacagccgctggatcaagcgctccgaagtctggtcacgcaccacgtcgttctcctgctgacaacgcatcagcaagtcccgtatgttgatgatcacctcacgctgctggcggacctcagtctcgagctccttgttgcggatctcgacctactcaggcgatcggcttggtatccgtcagccctggaattctcgtccaagaaagagtaaatagagtgcgcacctcttcgatgtgcttgttctgccgggccttgtaggcgcgctgagccgttcggttctgctccctccttcgggcctgcttctcatcgtcatccgtggcctgcaggagaaagggcgttcgtctggtgtcaggctgggaggcacaaagcgctggggcgggatagaggcgatgtacggaccgtcttctggctcattgcgacgcgcgtgcgcgaggagccgcgtcgggccgaccctcgcgccgctcttcctcctcccgtcgctgacgccgtagggcgatcaatcgcagtgtagctcgagtcggactcgtcgccagccgtagggtaggcggcggcggcgacggccggcgctgctcgatagtgattgtaggagggctcgtgctgctggccgtatgaagccggcatcgagtgcaagtaagggtatgcgccagctgcgcctgaggggagcatcgagggcgggtccatcggatgcccgccccggccggtcatggcgacgacggcggaggacgacgacgaggatgaggcggagggcgggcatccgatggacccgccctcgatgctcccctcaggcgcagctgacccggaccaaagggggcaattggttttagaccccgggcgaaaggtcgtcaaagactcccccccccccccaccccttccagcgtttcctagatgcggtacccgacctcgcgccacctccctctcgactctgtagctcccgcacgacgatgaatatttcatagagttgccctcgacgagcggccggtcggtgggtagcattttggctttgtgcccgaatgcgtccgaccccagttagcgctagtggccggtggcgaagccgtgcaacggcacaagtcatccgttgcgagtgccctgccaggagaaggtcgtttcgcctgcgcgtgcactcggtcgtcgagcgtgaaggctgagggcggcgaacaagggagggggccagagtgagtgcaggtctcttggacggaggggaggagcgagggctgccctccttgttgctttctcggctggcggcctggccgggcagtcactgctgcgccttctgtcgtcgtcccgccactgcgcgctgactggctgaactttgtctcgaggagttcgtgaggaacaggtcatctgttgcgcataagggctacatgagggcgaaaagaggagggggggggggggggcgtggggggcccctggttcgggttgatgttgggttgcgggcgcaagaaaatgaacggtcagtacgacgtcttggcaaatcaagggcgagaagcagggaatggaatgcgcacaacaagtcctcctgggcctggatgacgcgctgcttgagcgtctcctcacccttacgaacccaaacgcgcgggtcgtacgacttcttgttgggcttgtcagcaccgtcggggttgccgacctgcgtcatcaggtactccttcttctcgaggatgaagtcgcggatgccctcgaggtacgcgaactggaggtccgtgtcgacgttcatcttgactacaccgttcgagacggcctccttgatctcgtccttggtcgagcccgatccgccgtggaagacgaggaacagcggcttctcatcgccgttcttaagctgctcagcggcgtaagcctggtgcttaccaagaatctccggccggaggacgacgttgcccggcttgtagacgccatggacgtttccgaaggcggcggcgatcgagaagttgggcgagatggccgagagggccttgtagacgtcaaagatgtcttcgggctgggtgtagagcgaggcgttgtcaacgcccgtgttgtcgacaccgtcctcctcgccgccggtgatgccgatctccatctcgagccactctgcgaggcgggcgagcaaagaggggggggggagcggagtcagctctcctggttatttaaagggcccgcccgcgcacacgcacggttcatcttcgccatccgctcaaagtacttgacgcaagtggcaatgttctcctccttggactcctccgagaggtcgagcatgtgggacgagaagagggggacgccgtgctccttgaagtaggcctcgtcggcgtcgagcatgccgtccatccagggcaggagcttgtgcgcgcagtggtccgtgtggaggacaacggggacgccgtagagcggggcaacggcgctggtcaagcgagggaagcgagagaaagtcagctttcggcggtcatcggccgggcgggcgcgcggagccggagtcgggccgcttccgacccgacccgcgctcgggcagcgaagggagagagacggaccggatgaagtgggcggccgcgatcgcacctccgatcgacgcctcctggttcttgttgtcgacacccttgccggcaaagtaggcggcgccgccctgcgagacctggaggatgatgggcgacttggtgtcgcgcgcggcctcgaggacggcgttgacctgcgagagatgcgaaaattgggcgtcagggaccggtttcaggcgggctttctgctgaaagagcagggtgtgagggacgcacgaccgaggacgaggtgacgttggtagccgggatggcgtactgcgagcgaagaaggcaagggtcagtcgagttcaaggaaagggctcgaatgctttcggcccctcggctcgaaaacggaaggggacaccaaccttgttagcccgagcgtgctcgaagagggcgcgggtctggtcgcccgaaaggacgccggcctgcagtcatgcgaaggacgggtcaaagaggaggaaggcagggggaagggcgggttttttcagggagaaggatgattggtgcgcgcgcggagatggaacgagagggggtcagcaagggcgtcctcctattctccctcttgcgcagggaaagagagactgacggggacaacagagagagctccggaagacatggttgaaggaaagtagggagggttgagggagaaagaaggggggttgatggtagttggagggttgtaaggagcgtgctgtgcttcgactctggggcgaaaagcaacagagaaataaaaaagggtcaagagggcatcatcgcttgccgccggcagtggcatctgcgggggcctcgggcacagagacacagggaagagacgagcaaaaagggatcaaggagcgggcacaacaacgagacaagagacagagctgggagagagttcgagaagtgacgacagcggaggggcggacgagtgtcgcaaggcccgacgtctggcagggagttgcggtcaacccaaaatgaatgtcgagagagatggcattccaacacggcgtccctgtagcatcgaggcgctcgacgaatatgaagcgaggaggagccgtcgacgacggatggcaaacaggggcatgcgaccggcggtacggtcgtccacgccgagcccatggcggtccatcacgtaaactggtaaaggactgtccaaaagccgcagcgagcgcaagagttagcaaccaagcgcagactcgtctaggaggcagagggcagggcaggggatgacgacggacccttccgggccaagcgcgagaggtcggtctcggcgccccagcgcatccggtcgcagagcatcgccatcgcccaagccgtcagcattccctcctccaacacagcggccgtgtgcctcgccttccccactcgcgcccccccggccccgccagtggctctcgtcgttcgctggcggagagcgaggtacgcggccgtgatagatttgggcaggacgtagagggcgagttcgggccttcgcgagggcgtttcggcaaagagggcgagcgaggtgagagcgcctgcgagccaagggtaaaatttcgaggtgaggagccggcggacgggcgacggggaaagggggtagaggagcggttggagggagatggccgcttttttaacgtcccgaaagagtaagggtgtcagctgcccgaagagcgcatccacgagccaagtggggagaggggagcgcacagtggtagatgacgacgaacagcgcaagaaacgtcccgctccggacggtgccgacgacggcccgccggaggagcttcaggagctcggcccagtggatctgacgccaccacctcgtccagcccgctgctgctgggggcgaagagcgcttgggagtctgaaggccggaggcggatcggccaatattgagccctaacgccgccgtactcgagtcgaccggtcccttctcctgctcaacgtctccgacggccccctcgtctgccggcgcgtcctcctccgcctgcggtgtcttgcgccggacgagtttccggcgtttgaggaagacagccgggagcgtgtggagcgcggcgtagacgggcagggcgcccttgaagacgaggccgaagcgggcgagcaggttgggcaggacacggtcgtgcgagggctggaggagggcgctgcgtgaaggaggcaggaacagattttgggttagtaaagcccggaggtgcggacgtcgaggtgtgagcgaggagggcaaggggagagggcgcacggagggataaaaggcggcccaggccaccgcccgccattcgcctcgagcgtctgcagcatctcgccgattgcgatccgatggcggagcgtgacgccccttgggtggtcgagcaccttccggacggcctgagggtccatcgtgcccgtccggaggagcgagcggaggatgctcggcgcttggacggggccgttgaaggtgccggtgatgaagcggttgaaggaggtcggcatgcgctcgggcgccatctgcggccggatgaaggagagtcagcgaagcggcacgaaggttggcaagaggaagaggggggcgcacgatccacgagtacatgatctgccctgcgcagagcccaaagaggacgacctcgccgttcgggagtgaccatccaacctcacgcatcgcgccccgccaggcgccctcgagcccgcggacgagcacctgctcaatcaccgaccggcgctcgccgcccggtctgacccagtagatggcgatcccgcccgcgagcgcgcccgaggcggccgcgtgccagcggcgctcaccgaggttcgcgtcgtattcgacgggcggggggccaaaagagcagtcgagcgagaggacgtcgaggccttcttcgacggcctcgaggagcgaggttgattgggcgtaggaccgccggaggaggctgagcgagtggagcagccggcgccggacgtacgtgatgggcggggcaaggcgaagagtctggccgacgagcgtgtggaggaaggtgaatgtcgagaggaggagggcgaagcggagggctgttgaagagatgagggcccggacgaggccgcggagcgttgctcggccggagaggagcgaccggaagaggtataggaggacgttgacgcctgcgcgcagtccaaaggccgagatgaaactgtgccgagggcaggaagagtccgagggggtcagtcttcttcaggcatgaagaggtcgagcacggccacgaccccgcactcacgagcgcgtcgacttgagcatcgtcagcacaaagacgcgctcccagtcggccggccggcggggcagctcgcccgacggccggaggatcgcctcgcggacgtcgcggagcgtctggcgcgcgagctcgcgcttagcttcaaaggccgcttcgcgctgggcttcctcgtgcagggcttgctgctcggccgcggtgaggggagcggccggcgcggaggctgagcgctggggtaggtgatggccgccagccgtcgccgaggggagatagatcatggatgacgagggcgagacgcctgaggtcgcgctcgaccacccactgatcgcaccaggcgtcgccgtcaacgtcggtgactcgggcccgtacgcattcggagcgagcgctgcggcaggagcgactgtcgctgctgacggccgccggccggccgtcgtctggagggcggcctcggtcgcgaggtcgagcagattcgtcaggctcccgagcgagagcgtccgccggatgtgggccgcggcttcggtcaggctgagggtcggcgttcctgggtccgaaatgaggcctgctcctgctgctgctcctgctgagctgccctctgctactactgatggacgacgagcgtcggcatcgaccgccgcagccggaaccagtggggtgaacgtgtccttgaagtggaagcggacgcgggaaggtgatctgcgggggggaaccgtcggcgactcgtcctcgtgctgctgcttgagcgtcgggctcggtggcatgctgccttcagtgctgccttgagcggtcgatgtactgtcggccgtctgttgcgatggtcggtcgggtcgcggccaaggcgagttgccggacgagttgccggcgacgaacccccgacgacgacgacgacgacgacccgacgatgaagaagacaaagcagacaaaggtacggccagccattctgagcatccgcttgctgcccatgctgactgtcgtgctctctgtccttacccggtccagttcccggtcgtccgtcccttcctccgtcgtcgtcgtcctgcgcgagcgggccgcccacctcgcctccctcttcggagctgacctcgcgtctcgctctccctctcctgcaggcccggatcaagaagattatgcagacggacgaggacgtcggcaaggtggcgatggcgacgcccgtcctcgtctgtgcgtcatttctcgggtcgcccgttcgctcttggctggatggggaggagcgacgaccagcaagcagcgcgtcagccggccgggcctttggctgaccccccttgcccccttctccgccatgtcggctccttgcctgcccgccagccaaggcgctcgagctctttatggcctcgctcgtcggtgccgcggccgaagagacgcgtgcggccaacagcaaaaagatgacgccctaccacctgtcagccccctccgcgcacgcgcgctttcaccctccctcaatgggccctgaccctctttgctcgcgagcgacggcaggaaacggacgatcctcaacacgccgatgtttgatttcctgcacgagcaggtcgcggcgatcccggacccggtcgcgtcgacttcgactgcggcgggaggcaaggcgcctgccggtggtgcgcgcggcggtgccggcggcggggggcggaagaagaaggcagcgccgtcgttgtcgcctgagggctcgtcgggcacctcgtcctcagaggacgacgacgaggacgacgacgaagagaggaggagaccgcctacgccggcaaggaaacgtgggccgccggcaaagaaggccaaggtcgagattccgagctttgcgagcggcagcaagccgctgatcccttccttgccgactgcggctggcggcggcggcggcgtcgtgccctcagtctttgcgccggctccgtccctgcctgtcggaggcgttgggctgccgatgtatacacccggcctgccgcttgtcccgggcccgagctacggtgcggcgccggcggcggtcaagctggagcagcggcaggccggcggggcgagcgagagcgagagcgggtcgtcagacgacgaggacgcctagggccggctgcattctgatgtcaaccctttctcgtgtcatcttctgctgcccagacgggcttgcgctccctgggaaaggtagcggtcgagtagagggggcatgctcatcgtcgtcgagaggcggctggctacctccgcttgcccccgccgcccttgccgcccttcgtgcccgccacagggggacgcacacagtgtggccgcccttggcgagcaggaggagccggtcaaactggtcaaagaggagggccgacggctgatggatcgtgacgagcatcgactggccgttgtcggcgagcttgcggaggaagcggagaatgttgaagctcgactggccgtcaaggcccgacgtgggctcgtcgaggaagagaaggaccggcttggcgacgagctcgacggcaatcgtgacacgcttgcgctgctcgacgccgaggccgacgttgttctcgccgatgagggcgttctgaatgtcggtcagctcgaggagctcgatgacggtgtcgacgtaggcgatcttctcctcctcagggacctcggccggctggcggaggagggccgagaagatgagggcctcgcgaaccgtttggtgcggctcgtgaaggtcgacctgcgagacgtagccggtcgtgcgcttgaacgacttgccgagcggccggccgtcgaccttgatgtcgccctcgacaacgccctcgtccttgcgaagagcgagaacgtcgagcagcgtcgtctttccggcaccggaggcgcccatgagagcggtgagagtaccgggctgaagaagagcagagcggcggcagtgtcagcaggcgctccgaccgtcaacgcaacttggccgacgacgcaccttggtgtagccctggacctcggcaagcagctgacgctggccgcccttgacaggaacagtgtagttgaggcctagcaggggtgaagaagcggagcggtcagcgcctcgttcgtctcgtaaaggcaacagccggcgggggacgcacccttccacgtaaagacggtctcggtccgcttgatcttcttcgcctgctcagcgagtcccttgccgcccgagccggactggccggccttctcctcgtcgagagttccagcggcaatagcagcctgctcgtccttgtcgttggtccgctggaagaggaggtacgacttctcggcaccctggggccggagccgctcgactccggccgccgtgacggcgacgaggaagatccagagggcgatgatgatgccgacgttgcgccagaggtggctgtggcggtagccgagggcggcctcgaggtaggcgtcaccggtgacgtaggcctcgccgacctggctgccctggacggtgcacgcaaagttgttgccctggccgtaagcggggacgagcgagccgccgacacagtcaaacgtcgtgtcgtggaactcgttcgacatggccgcctcgaatccgtagtagagggggttgagccagcgcgtccacgagagccacggcttcatcgagccctgcgggatgaggtagccggtgtctggagaagtgggaggggtcggcggtcagcttcgagcctctgagcgacgccttcaaagatccagtctggacgcacagagaatgagcaggccgacagcgagaccagagacctgcgaggcgccgtcaaacgtcgagaagttgaagccaatcgcccggaagaaggcgagcagggcaagcgtcgtgacgtaggtgatgaaccagagcgtgaaaaaggcgccggccgtctgcttgagcgagcacatgaagtagatcggaagcagctggagggaggaagacaagagaggcgtcaacacagggctcggtgacggacgcagatcgcgacgagtgtgggtcgactcacgaaggcagaaacctggagaatgaggatcggaaagtcggcgagaacctgggcgagaacgagggcagaggggctgcaagcgagagcagaaggtcagcagctgcggggcaagagtggcaaacagactggcgacgcaccggtacatcgagaaggccttgtgcttggcgagaatcgcacggccgtcgaacgaggtcgtgacctcggtcataccgagcagggcattgaaaagcaagatgaagaagatggcgccgccgcgggtaaagaggccgttggtcgtctgcggcaggttgtagaagagggagccgaggatgatcgactggatgatgcacgagccttgcttgataaggatcgagcccttgtcgttccacatgagctggtactgccggaccgtgcacgccttgacctgcgtccaaaggctgacagagtacgggttgttcttgccggcgccgcgagccttctcgtcggcaacggcctccttgaactcggtcgtctcagcctcgagccgggccgtgtcggcgaggtggtcggcgagctcgcggtcggcagccttacagatctcggacgcgaggtaggtcgcggcgaactcctcgggcgtgttgggaacgttgccgcgctgtggggcagggtagtgtcgtcgtcagtcgatgagcgctggacgctgagcatcgcaccgggcccggccgcaccttgctctcttcgacgatgcgctcggtcgcgacggtgacaccggtcaggtagtcggcgacgttctggccgggcgggcacttgaagccgaggttctcaaagtagggccgggcctcggagcgcggaccccagtagatgacgtagccggcggcgatgaccatgacctgggcaagaaaaggagagcagttagcaggccggacggcagagggtacaccctcgagagaccacttgaggacttgccttgtcaaagagatcgtagatctggttgccggcctggtagagcgagatgaacgaggtcgtgccgaggatgtcggtcatcgtccggaccgagcggacgaactcaagcgcggtcgaggcgtcgaggccgcgcgaggcgttgtcccaagcaacgaccgaggcgcggttgacgagaatttctgcgatcgagacgcgcttgcgctcgccacccgacacgccgcggacaaactcgttgccgacgagcgtgtcgtgcgtgtgactaatgccgagcgtcttgaggattgtgtcgaggtaggccttctcaaagtcctcgcgcgagacaccctcgggccgcgacgacggcgtcttcatcttgaggccaaatttgagcgtctcgccgacggtcagggtctgcgagaaagcgggagggtgtcagccgaggcgggcaagagggcgagcgcatagcctttgggacgcaccgggaagtgagtgtcgtcctcctggttgaagatgatctggccaggatacttctgggcctgctttgcgtccatgctgccaaactggacctcgccgtcgatgccggcgtagccgtcgcggacattggtgacggccttgaggaaagtcgtgcagcccgcgcccggtcggccgacgacaaacgccatctcgcccgacttgaggacgccgttgaagttctggatgaggaacttctgattcttcttgagcgtcgtgccctcggtcgacttttcggccggcttgttggccgcgagcgcctttgcgcgccgccggtccttgatcttggtcatcgggttgagcagcctgagaatgggcggtttggtgtcagcatgatgccgaaggcgagatagtgagagggcttcgcgtcgtgaccgagtctctgagcggccgccggcaaatgacgcgcggcgcggagagaaagaactcacgagccaaggtcgtcggcgagctgagcgtcgccgccgacgccgcggacgctcaggcccttccaggcgacgtcgagtcgcttgttcttgatgtcctcggaccgggccatgtgcgacctcagccgcttctcgagcgagaacttttcctcgccgccgttcgaatgggcagagtgccgcgagagcgagcgccggagctcgaggaacctcgggtcgtcctgagacagcggcgcgtcgacggccatcggctggccccagtgcgacgaagaacgctcaagcccgggcttgccgccgtcgagcttgtcgtcagcgagcggcgtgatgtcgcccctcggcaggttcgaaccgaccgcggtcggtgcctcggacgagctcgaacgatcggacgccgacgacgcctgcggcgggcgcgccgagtcggaggcggcggcgagggccgagatttccttgccgagaccgaggtcgaccgacatagcggaaggagacggtgacgggggaggaggagggtattgggtgagggagagagggaccggtctctgtacttgaggagggaggaagagcgagggaggggggtatggccgttgagggacaagaggaggagggaggaagggcggctgctgaaatgcggaggccgtcgctgcgtgggtcggtcagtcgaggacgaagggcgggcgggcggtggagcctccccgaggccgcgaagccctgctgcccttgatgactccgactggccgagcctctctccggcccgaccgaccctctcgatgctgactcgcccgcaagagcaagagggctgcagctactcactcgagcacccgtccctcggacgcacatccctcgcgttgctaccgtcgtcttgcccgcgcaagaggaagttgcttccattgctctcgctcgcgtcggctgccggctcgactctcggccgagcctttcccgcgcgaatcggccatcgaaaaaaggagaccaagcaacccgatggccaacgccgccgacgcgtcgccgcccgacccagcgcgtcggctcgcgcctgcggcctgcaggcctcgggcgagcgaagcaggtcgaaccggcggccggactgtcctatttcgcagccgcgggctgatcaagacgcctcatcttgaaaaggcgtcaggtagacagtcatggcatgatcgagcaggctctgtcagcccgacaacagcagggccgctcagcgctccgccgagctcagccgctcgagcgcgtcagctgcctccttgagcccgtctgcgaagccaacgtcggcgctccacttgtgagcggccttaagttgcttccgggcctctcgtgcgtcgccagccatctgcgatagcgcagtgcgatagcgcgggagagagagagtcggccagcagaagtcagtcacagtcgcggcgaaacgatccgggccgggtggagagagcgggaccgacctctgcgagcaggccgagattgaagagggcgacgctccgcacgctctcgcacattgccttccggccgagtgtctccttcacctggtctgccaacgtgcccgcaccgccggcagccgacgcgcgcacgacgtcggtgtccttcgcgccgtctgactggccgatcgagaactctggctcagagacgagcacgcgctcgatcgtctcgagcgacttgaccgcccacgtcttagctgcggcgaggttggtcgccgtcggcttgagtgagagcgtgttcgagaggttagacatcatctgcggagggaggtgagagcgcggtcagcaaaagccggggcagaggtcggaagactcatcggtgacgaaccatcgcggctgaggagggtaagaaaaacccaacgcaagtcagagtcagctcatgcagcgaaaccgacctcgtcggcagcaaaaactgacctcggcactgctcctcgaccgaagcggcgctcgatgacggggcgtctggcgggaggacgacgttgatcgcgtgcaggtagagcggcgctgcgtaactggagggtcaaagacgaggtctgagatcgtcagcctgatagacgacgcggagagcatgcgagggacgcactctgccttgccctgccggaggtagagccctgcgagccggtcgaccgtcgcgccgacctgcgtccggtcgagccaccctggcaggaggtcgtccaggcccgggtcgtcctcgcccggagcctgttttgtcgccgtcgctgctgtcgagccccgaccgtccgccttggccatctcgccgagcgcgcgccgctgggtggccgaagcgcgcaggacctcggtcactgccctcccggcatacttctcctcggcgaccgcatcgcccatccgctcagcaagctccgccagcttgttgagcactccgagccggcggaggcgctcgccagccgacagcgcgccatcgcccgcggcgtcgaggtctgcaagcgcaaggaggaggacggccgtcgcgcgctggggcgcacgctgccgatcggcctggacgtgggcgaggatcgaggcgaggccggtcgtgtgtaggagtggaagcggtggcgaccgcgaccgagcgacgttgagcgccctgcaaagcaacgacgacgatcagtagagggcccgatgaggtcgaatgaggcgcgcagcgggggacggactcggtaaagtagcgctcggcccggaccgtgtcgttgttgtcgagcgccttttgcgcgagcttgagcggcttccggacttcgtccggccacgtcttgtagagctggagcagcgaagcgcgatgggaggtcagcgatgggcctgtatgcgcgcggtcggcgacgaaggggaacctaccgcgtagtagtccaccgcgtacgccccgagcgcgcctgcgccgagcagggcgagaagaatgacccatgcgatcgggtccttggtgtaggctgccgtccgccagcctgaggccgtgtagcccgtcgggggcggcgtgctgcttgtcggcgtcgatgaagctacgtctgggtcgagctgtgtcggcttgaggccggcgcctggaggtggagggagggtgccgtaggaagccgctagcggtcgggcaaagacagcccggcagctcggaccagcagagagcgagcgcgaggcccggattgagcaaaggagcgtgcggcaggcggcagacatggtcgtcgagagggtcgtggtcggcagtgagctcgtttcaaggggcgaagctcgagatgaccgcatcggcgccgttcgggccgacgactcgcaggtgcaagttggctcttgcccttcggcctgtcgctcgagcactcgacggcctggcgtcccacgacacagacccttcacaccgacgctcgtgtagattgctgatcggcagagggctaaccgtcccgctcatcaactctcgcgcgagcgcactgcccccggtcgagtctgcgggcgaacgggtcgagcgccacgccaaggtgaagggaatggcgagccctacaagaagggcagggagggggggtagtcggtcccctcttctctctcactcacactcaccatctcgacctctccaacgcccctcgccatctcagcctacccctccctgccagccggccaacttctctttccctttctcgctccttcacgagggagaaggggttaggggcttcgggcgagggttgaaggagcgagcgagtgagggaaggagggaccagacctgccagcgacgccctacgcccagcggcagtcagtcggaccgtcaggtcagtcgatccgacggcggcgcgcgcaagaaagagatgagcgacggacaaggacatagacgatcagcggcttgtcgagctctgccgcgtcggtttgtgcgaggagtgccgccggcgaggccgaggatgaggttgtcatgtcgcttggtctgttctgctgttgggagcgaggtcggtgtcaagagggtcaagagaggcaagggcggtcaggcggtgagctcgatcatccgcagcagccgccccaccaaacttcgcccgccgcgaacctcgggacagagacacatcaaagaagtctcgtggaactgtacaagtgagaggggtaggggcgggctaggaaggagcagccggagtcttcgggtcaatacaagggggtggcagagaggctgaaagagaagggagggtccgagagagagggagagggaaggatgagggcgcgctattcgacgccgaagccggccgtctcttcgacgctgtttgcaggttgtccaataggggtcataaggtcagccaagagagagcacaagatggcctagagcggggggactcacgcccacgagagcttcgtctcgaggtcctcaaagctcgcatacggcggcaggtcgatccggttaaagcacgtatggctgctcggtaggttgcccggcgcgcctgacttttcaatcgtgaacctcctcgggccgtccgacccctggaggtccttgaagccgttgacggggatgcgggaggtgcccgtgctgaattggaggagccgcgccttcttctcggcaggccacgaggcgacgcacttccagaaccagccgacaatctcatcggaagggttgtagccgcgctagcgagcaaagcaggcgaaggaaggggcgcgttagccgccatgtgtcgggagcacaagagacaggaagaaagaagggccggacgtagtcggtgtgcttcttccagtcgtccatgtcaacctcagatacgccgccgatgagcagctcgagctcgcgctcgtcaaacacgttgaggagctcctgcgggatgagctcattgaagcccgacatgagcgcgaggtgctgctcttcgacacgcttagccatccggtactcagtcatggccctggcggaagcgaagcgtcgtcagcgggggcatgtctgaaggacggcctgccttagaagggattgcggcagggggcgggacgcacatgacgtagtccttcttgttggcctcggtcacctcgacctgctcgcccccagggatcagcggaatctcaatcatttcgccaaagcggtcctcctcagtcgaaaacgtgttgtcgaggacgtcggtaatgtcgttctcgctgtgcggtcgcaaataatgaggaagcatttgaagcgtcagcccagattgatgcgagcgttgatgcggaggaggaggaggggaccgacagcatccacttgagcccacggtagagctcgtcatcggcgctctcgaggtcggaaaagaggagcttcttgccgaggagcatcttgtagaagctcccgatgaagtgcgtgtcgaggaagcgccggtggaagacggccatgccaagaacacggccgacaaacttgaagtctacgtgcagggagggaaggaggggaggttcagcaggcaggacgaggaggcagaggcaagcaagttcgagcgtcttacagttcaggtgctccgggttgatgctcgaggccgggttgatctggagcgtgtagttgtcgacggcagagtactcaaataggccgtagtttgggtcaaacagctggctcgagaggaggaagaaccactcgcgtgagaggccaccgtagtctgcatagtggacgaacggacggtcagcacgggcgccgcgggccggttaagaggcgagttgacagcgcaccgaggccgtcctcgccctcgaacttgatcatgagccgctttttgagctcgttgggtgtctggcgcatgacctcgacgtaagagttctcaaacatcatctcgcgtgagaccttaagatggacctggccgacgaccggccggagcgtcggctgcgagcggaagtagacgagcttgcgccggaagtcgcgctggtactgcggaacatcggccccgagcgacgacggcagccgggggtcatcccacgtcgtcgtcttcgtgttgtggtcgacaaagtagacgcgggccgtgctcgtcagccgcatctcgaagccggacgggagcgggccgaggttcgacgccgctgttggttgggtcgccgcttggccttcggacgcgatgggggcgacggtctggcgcgggtcgcgccaggtcgtcgaccggtcgttgtggttgacatagtagggccgaccggtcggcgtaaagcgctgctcccagccggccgggaggggccctccgccactaccaccaccaccaccaccgccaccactgctgccagccgctgcactagggccgacggcgccagaaggcgacgggttgctcatctggctgcccaacgcccggttcgggagcgccgcctgggacgctgcgccggggtagccggcggcaacggccgctgctgacgacgcagacgcagcattgcccgtcgtcggccgcgtccacgacgtcgtgcgcgagttgctgaaagtgcagagtcgcgaagtcagcattctgtgcctgaattggaaagagccaatacgtgccacgcactggtcgacgtagaatgtccggttcgcactgtcgagccgccgctcccagccggctggcagagggccgtgtcggtcggcgtggggcccgtaggccgcgtcggggtcgacaaacggcgcaggctgctgctggacgggctgctgctgctgttgctgttgctgctgctgttgctgctgttgctgagaaggggcgttgccgccggaagggatgcgctgctgctgctgctgctgctgggcccaggcatgctgctgattgttggcaggatgcgtcggcgggatggccgggaccgtccggcttgagccctggttgaactgttgttgctgctgctgctgaggcgcgaaaccaggcccgccgccggtcgcggacgacgggtactgagcgtgctggccgacgagggtgtctggccggcggagcgatccccctgccatgctcgacggcaagccggtcgccggcgccagcgccggcgcagccaccggccggacctcgtccgcgacgagccggaagttaatctggccgtggacgaggaggccctcggtcgccttcttgagctccttggtcatgttgcccgagctgtcggccccgcgctcgtccgagacgcggtgctcgagcaggccgagcgaggcctggccgcgcttagcgagcttcttctcgtcgaggatgagaatgctgatgacggccgagctcgggcaggtgctggagagaggtggagccgagagatcagctcgagaagccgtcgtactcggcctgcatcaggacgcacaactcaaacgtctcgtcccagtagggattcagggtctgtgcgacagcgttcagagtcagcttcgagccacagggaaggtatgggggggagaaggagaggcgaccttcttgaccgccttcgtccggccgatctcctgccggtcgacgctgatgactgcaagcgggctcggaaggctgagaaggatcggaccgagacggatgccatgtcagcacttcaggcccagtgcgacacacgagacggaggaccaagggacgcacgcaaagacctcgcgtttgacaagcgagctcgctcccgtcactgatgggcggtcgagagaggcgtcgggccgaggtgcgggtcagctctagagcggcgtgctgcagcctgtctcattgcgaccctcgattccacacgcacctgtcaggcggaccttcagcatctcactggtggtcgagcagaatcgggacaaggcaggaggggcgagagggggcgtcaggctgggtggactcggagggagaggcaaacgcccggccgggctgacacggcccgcaccgccgacgacgacgaaaggcgcgccccgagcccccatctcgagaggagagagagagacgatgaggacgtacgagacgctgccgttcctgctgattgacatggtgctggagtcacttgaatgtgtctgggtctgggtcgctaggggcgtcgacttgctgctggtggctggcgaggtgcatctcccgccgcgtcgccgccgcctcctctcgccgcacctcgccgcacctcgccgcgcgctgccgctctgagcagaagcgcagcagcagaaatccacgtcgactcgatcgcaagagggacagaggccatggtatggagagctaggaagacaagggcaggggagaatctaacagccagcggcgactctttgcgagcagggccgccgcgagccggggtcgagggggtgatacaaggcggatgaccgaggggtggcagggaagaggtggtaggcgagagaccttcgagcgacatttaaggacgccggtcgaccaaaagtttccggccgagagttgtaggccaaggacggagagcggggcgagcgagtgtacggaggacggaaaggggcgagcggcgaggagcttgaccattagagaagcccgcagtcgcgcagattgacctggatgatgatgtcgttgatggccgagaggacgaatctggaaaggtagggatcgtcagtctttttttgcggccaagcggtggcaaccgtgtccggtggagcgcacttgatctgctgcgtgtcggtcgcctgcgtgtagtggcaataaatcctgtaggcgcagacgaggcgtcagaaagaggttcaaggcgcaatcaaggcaaggcagagacgcgcgacttgtctgggctctggttgagcgaaacgaagcggtcgaggatgtaggccgacgcgctgtcgtagtcgttgccgccggtgctgtagcgcatcgcagcgaaaggtcagtcgagccggcgcgtgctcggacctcagggaggagacgcactagtcctcgaagtagtcgccgagcggcgacgagggcaacttctcggcaaagaggtcaatctgcgagcgcaagggcgcttggtcaatttcgggtgtactggcagggataggaaggcaggggcgacacaccttgttgaggaagaggatgatcgacgtccggacgaaccagcggctgttgcagatcgagtcgaagactggcggcggaaggcaaaagggcgatcagccttgcgtgctgcgaggctctgctttgggggaacgtacgcgtgagagcttcctgcatccggttgacgctctcgtcctcgtagagcttctggtcgtctgaagcgggtggaaagaaaaagcgttggcgactgacttccaaggggagggcaggctggcgcacgcacactcagaaatggcgacgaggaagactgccgaaggtatagagggcagggtgatcagcgacgggcagcgcgaaacgaccgagatatcggtcttaccgattgcagtgacgttttcaaagcagtgctgaaggaactcaacgcagtcggtcaacacctggccaacaagagaacgccagcaaaagaaaagacaaggccgcacgatccacttcttgcgctcagaccgctggccaccgacgtcaaagagcttgtatgagagctcgccgatccggaacgtcgtctcggtgatgccggtcgacttgacgcgcgagcgcaggacgtcctggtctgacggtaggtagcgcggcgaggcaatgatgtcaatgtggtcaaagtagctgtaatgcgagggagaacatcagtggtcggaacgagcgaccagatcacccggacagaacgcactactgggcgctgtcattgagctgaatttcattcttgcgcttgtaggccgcccggatgccgctgtcggaccaaagcgccttgcacgcccgagcgagctcggacggcatcaggtcgccctcgatttggtgcggcgcgttcaggatcgcgtagaagtgaggctcattcgactggttggcgagcgggatgttcatcgcctggagggcgtcgacgagcacgctgggaggagaacaaaggggtcagccttggcgtcggccggtagcggagcgaggtgtcgggcgacggaccgcatcgactggacggtgttcgagaagatgatttctttgtacgactcgcgttcttccgtgttgtacgacctggagtagaaggaggagcaggagtcgcagcggtcgagtagctcagtgacaggaggtctgtgcgcagcccgccatcgagcaggccgctagacgagaaagagagagacgtacccctggtggatgagcttcatctgcttgaggatcgtgctcttgcccgactcgcccgcgccgaggaggagcatctggaaggagagaagggatggcgggtcagccctagtagcctttggcagctgccaaacccctttgattatcccgcccgcccaccagccctcgacctcgagcacttgcgctgcttcgtcgcagatcagtagagccagaaggcagccagaggtagctactggtaccgctggatggacctggctcgggcgtgctgggatgccgtgacaaaaggcagaccggaggaaggtccgagctcccgccgccgagctccagggctgctcggcccgaccgacgcaccttgatctcgttccggagcgactgccggtcccgcttgagctggctctcaatctcatcgttccctgggggttcgtacaaggcgtcagctcgctgcctgtattgtagtagagccagagaagggctgagctctcctgccctcccgccgtaggaggcgcgagctcggcccaccccctccgaggtcgcagctggcgagactcacgggccctggcctcagtgtcttcgtgcgagagattggaagcgccgcagcccatgatgcctttcgggtttgcaggaaggagaagggagaggggcagtcggggtcgaggtcgggagccgcccgtcacgcttccttcggccactctctcacgcgcgatccgactttcgctccctgcgaccgggcgccggcttccctcgcgcaagctcttcctccttcacactcctcctctctctgcccgccttcgcacggagcgcttttcgacgctgcccgccctcctttcacggtcagtcctgcgcggcagtcgtccgtctggcgtttcaagctcgaccagcgcctgacctcgcctcgactcgcccgccgccgatccttcaggccttgctcgctcgtcccatccccaccgcagcagtacgacgcgtccttccgcccagccgtcaacaccgccagccctcgccctccctcgagcccggcccggcccgaccttttcctcccttctagccagccttgccatgtcgtacctggacgcagacgaggatccctcctcggccctggccttctcgtgcgcgtccttcgtcctccaggagcttgactcgccctgctcgtcccggccgtcgtcgcccaaaccgcttgctgccgtccctgacttcgcgccgccgttgctgaggcagcctgtcgctctacacacaccggccttccagccacgcgtcgtcgccacgagccgaccggacgacagcgttcaggccctcatccgacgggtcgagcaggagagcctaaatgccgcggcgaggacctcggagccccgacgcgagggtgcgtctccttgacttgagcctgcctgccttgaatctccagcgctgacatctgtccctcctgctgtcaggccagcgacggcgacgtggcgatgtaccgcctcgcttccggcccgcaactccatcgcagctctccggcgcgccgccgcaacggccacggacgccggccacaccccagtcgccacgagaggcaacgtcgcctggccctcaggccgtaccacgaccggcctttgcgcgccagatcgacgtccagagggccaaccggtacggctctggccaccgaccagcttcgccttttgccgcccagtcggcgccgccgacgcgactttcgttcgcgacctggcaggcgggtcccaacgcttccgtcgagcgctcgcagtcgccgcccttctccgactgctcgacgctctcatcctcatcctcgtcggcacttcactcgccgttcgaggcgcgccatgccgtcggcgtccagcaggttggctaccctttcccgccagcctcgcctcgcaagttggccgacgactgggccgagtcggccaagtcgcttccgagcctcgagatgatccagcagcggatggcgcgcggccgggccgacggcgccgagagcccgacccgggcagccttcgccaacggcactggtgcccgccaagggctgccgtcgttcctcctcgctcgtcagggtcacggcggctcgagcgcctcgtcgccgccgtcttccccgacggactcgctcggtcgggctccgctcaagacgccgcctcttcaaggtggtcctcgcgtcttcgtcacccctccgccgacgttcttctagacgcgcccgccttcgctcgcatcgaccacagacactcgcccttctcgggcctctttctctcatcgtcctccttatcttcctcgtcgtccctcaagcaactcgcaactcgcacaaacaatctcacgtttccggtctcgccctctctcactgtgtctctgccgccgcctttccgcgccacctcctgccttactcactcagacccctcttttgattctgtcgcgcccgcgctctctcgtcctcacataccccttcgtcgttctagctgtcgtcccgcatttccctcactctctccgacaccgccgcacacacgtcttgcgtctcggtcttcctctcctaccgccctctcttgcagcgcgcgccggccgccctgcctccttcctatcgttacgaacagcatgatcttgctcctctctaattgagcaagggccgcaaaatgttcagcttaaaggagcgtaacgctcggagctgttgtaggccctccgaagagcactcctacgccggggcggcgaggcagctgaggaggacgaggcgcagctgcccgctgccatccgaccgaccgccatctctcttcttcgcctctagccaagtcgcaaagggttcggccgcccctgaaccccctcggacatctctctggctctccagctcgtgcgactgacaagtcgacgaagcggcctgcgatgacgggccaggcgaacggccagccgacgtcaggcgctcggctcgctcctgaccctcctctctcggcttcgcccaaccctgccctgtccgagccgctctcgtacgccgctgctgtggcgtcctctacgacagacgaggtctcttcgtacctcccctcaccatcggaggtcagctctgttgcgtccgaaggcaccgagacggcagcctcgatcctcggctcagcgccgccggcgagcgcaacttcaacgcctctaccgtcctcagcacaacacgagcgaaggccaggtcaggtctcggcccaggcgcgctcgaggagctcgtcccggcctcgtcaggacgagaatcgatcacacactggcttgggtcggcctcatcgtccagcgcctgctccgcctccgccgccgacaacggcgcagagtcgcatgcttggagaggacggcgacggcgacgtgccgctcccgctcaataagtacaccctcttcgagacccgctcgtaggtaccatgagccacagtgcggtctcgaacaagctgggtctgacctctccgttctgtgggccgcctcgctcgtagctggttctacatcctcgcctcgtcgcagtcgacgcctatgacgcgagtcctcaagatcgaccgctcaccaccgccggcaagtaccggactcgacactccgacgccagagttcaacgttgtcgaggaccaagccgtctacaacgagcgtcaggctggcgagctcctccgcatgatcgaagagggaaaccgcgggacgggcggcctcgagaaggtcatggtcttctacggtatcgtcggcttcgtccgcttcaccgccggctggtacatggtgagtctcaagtgtcttcgtccggtcgcgatgcgactgagttcgacggacggcttgggtcatttgctccgcgtaatgcaatactgactcctgtcgccccgccagatcctcgtaacaaagcgctcggtcgttgccctcatcggcggacactacgtctaccactgcgacgagacgcttcttatgtcggtctccaagggcggctacgagcgctcggccgaagagacgaggtgcgggccttgacagcgatccctggttgcccatgctgactccttcccccccgggcactggcctgactgcaggcagctcaacactttccagaagctcgacctgtcgaaaaacttctacttctcgtacacttacgacttgacctcgacgctccagtgcaacctaacgggcacgcgtatccctgccgcgtcggcttcgacggccgccgacgacgacggcgacgcgacgcgcttccataagattgcccatcgctacatgtggaactacgcgctcttgaagccggccttcaacctcgagcctcaggtgcccgagtctggcgggagttggaagcctcctcttggcggcgaagggggcggtcgtggcgcctgggtactgcccatcatccacggctttgttgaccaggccagtgcgtcgttccaggcctcgttaaagcgcagtcgcccgagggcctagctgactggtctctgcgttgctcgaatgcagagcttgccattgtcggacggaccgtttacatcacgctcatcggccggcggagccgcttctttgccggggcgcggtatctgaagcgtggcgccaaccagtgggtgagtcgcacgcccgaagaggggctcatcgagccgtccactgaaccttgcgtctgctcacagggtcacgtcgccaacgaggtggagaccgagcagtccgtccttgcgcctttgttgagccccgagccagatcttgctgaccgcgcccccttctccaccttgccacaggatcgtctcggagccgtcgactagccctttccacgctcctgttcctcgctttgccaacagcggcgagcaggcgacctggacaaacccaaactacacgagctacgtccagtaccgcggcaggtgagtgtggcccacttttgcgaggcagctcgataacgcacgcgtagctgacatcccgctgtggcctgccacgctcaagcatcccgcttctctggacgcagacccccggcggctctcaattccgtcctccgatcgagagtgcgtgccctgctttgacgtgcgccgttgcagctctcggctgacatgcgccttcttcctgacagtcaacgtcatcgaccccttcttctcggccgccgcccgacactttgacagcttgctccgcaactatggcgggccgatcatcgtcctcaacctgatcaaagccaaggaggccgtcccacgcgagatgaagctgctcgccgagtttacacagtgcatcggctacctcaaccagttcctgcccgagggcaagaagctcatctacatcccgtgggacatgtcgcgcgctacaaaaaggtctgtcctgggtcgaagacgaggtcgctcgcatctcctgacgcgctcgtgcttgtcccaaacagcaaggaccaggacgtcgtcggcatcctcgacgacattgccgaggagagcatccagctcaccggcttctttcacagcggtcggatgaagcgcgaggacgggtgagtctgcgatcacctctcatgtggcagcggctggcagatctgaccgctcccgccgccccttgcaggaccgtcccgtttcgcaacacgctacagctccagcgcggcatctgcaggaccaactgcgtcggtcccaaactaatcgtcgattgtctgaagggcctagctgaatctgcactcttgcctcctcgctaggtcgactgcctcgaccggacaaacgcagcccagtttgcgatgggcaagcgcgcgctcggccaccagctctttgccctcggtatcctgcctagcccgctgatggactttgagagcgtggcgaccgacctcatgacgggcgtgcgtaccggtactcatctgcgtgccactgcccggcctccagctaatctgcctgccccaaatctgttgacagatgttccaagaccacggcgacacgctagcccttcagtactcgggcggtgcgctcgtcaaccgctgggacacttaccagcgctcgccgcactggaacagccactctcgcgatctcatcgagaacatcaagcgctactacgccaactcgctcctcggtccgtagcgcatcaggtgctgtttggggcggtgacagggctcgctgacatatttgcccttccgccgccacgaccgacccagacgccgagaagcaggcctcgatcgaccaatttctcaacattgtcgaggagcagcgggcgctcgcgctcgagacggcagccgagccgaggcgtggctaccgcgactggtttgcgcccgagcatcttgaggacgtcgtcagcctagccgaggccgagaggcggatcagcctgaccgtcgcccaggcttgcgaccactggaccgagtactatcggccccgcctgttcacgagcttcgatcggcactttgccatgcgcatcctcggctcaaagtcagtcctttctgaccttcctccgctcactcgcacgcctctgctgaccgcggatgacgctccgccagaaccggagccaatctcgacgtctcgcccttcaagtcgcgccagtccaaagcctcggccgtcagaaggtgcgtgtctgacgtcctctcgaatacgctgctcaagttggcctgccgactgacgcccgctcaccattcgcagggtcggcagcctcaagtcggttcggcggtggatgtcgactgacctcagcgccgggggcgactcttctattcccgagctcctggagccaccgacagctgccgcgcgcgtcaagaaggcaacagtcaagccgcaggcggccgacgtcacgacggcggaggaggaccggcgtgagcaggccgagtacgacagcctggcgcggatcgtctcgcgctgcctcgagccccgactcgacacgcacgagatcgaggaatacgtcaggtgcggcacggcatgtcgcctcaagcggggctgttagcgctaacataccttcgtctacagatgggctggctcgcacgaggatgagctcttctcttccgacacactcggccgggttcgtctgcccgcgcgtgtgtccttgcctccattcactgccggctgacccttcgcctgaacttctccagccgattgacctgtcgatgtacgaaacgacggtgcggactctcggcgagacgtcgacagccgaggcctatacctcgtcgcacgccgacatcaaggcttaccgtgcctactcagcctttgacgcccgcgagctgctcgaatcggccccgatgactagctctgcggccgggagcggcgcagatgcgcggacggcgaccatcggtcgggctttccaaggcggcaagggctggatgtttccgaccacgggagctggcccaaaggcaagccggctgctgagtagcgttggcgagagcacgactcgcaagaggacgctgcaggaccgggcacgcgtgtgagagtggcacaaagtgacgagcacgaccagagacgatcttacgacccatttgacgacgaccgctgttggtggggcgaggctcatctcacagcaggcggggcagagacgacgggcgagcaaaaggccagaggccaggccaattcggccgtctacaagcacgcgagagactgaatgactgacagtcttgcgccagacccttgaggccgtgggcgttaattcgcttctcgatcgcggttgcccagtcccagataaatgtctggaagtcgccagacgtcgcgacgtgcttgtagacggccgaattggcctggcctctggccttttgctgctcgcgccgggattctaggacccgcgcgaagacgttgcgcgaccaggtctcgagccggagctgggcctcgacgacgtcgggcgtctgcttgagaagggccgtcgtaaagggcacgggctgcggctcggcctttgggatgacgagcttgcccttcattttctgacccttcctaatgtgacctggcatcggcgtactctgccgagtcggcggcgttcgaagccctggcgaggccgagaccgtcggcgtcgtcgagaacgcacggcctgcccgccagatctgctgcgaaggacgcgccgcctggcctggccggagcgctgcgcctgcccgagcggtcgaggcgacggcagcgacggcactagtcgtgagcggccgccaggaatcgacgagcggaccaatcgcgagatgccgccgaggtgagagagaccggagcatagcgcttggggccgaggaccaaagaagcgcagaaagagctgagctgacggtcggacggatttcctcagcaaggcaggaaggccgaaaggcggcgcaggcttctgcgcgggggaggtccaggtcagcgccttcaatcctttttttttctcgagagaaagcctgacgagcttgtacaggaccaggcagaggatggggaaccgaccaggttgttggcctgctgctgagaaggaccgggaggcacgtcaggctgctacgtcgtcgtcgtcggcggcgaaggctcgactggtcctttcgcgcgtgccgttccgctggcgggcggagagcagctcggctcgagcgtggcaggcgacggccaccgaccatctgctgcctctcttttctctttagctaaagcatgtcgcccgtcccagaggatgcagagatcaagatcggcctgattggcatgggcgatatgggcagaatgtatgcccggcgcctgctccaaggcggctggtcgaggtcggtcccctcgcccctttcctcgcggctcggctcgcctcaagcttgcctcgccgaccggagctgattggcgcctctgtcttccttcctcggttagggtctacgcctgcgacctgccagctaggactgaggagctcagggaggagtttgccggtccgtcgtccagccgccggctcgcacagcgttaccgagggttgaccttaactgcccgacccctccgaccagacacgccgctcgagatcctctcgaccggccaccacgtctcgcgcgtctgcgacttcatcatgtactcggtcgaggcggctcacatcgacagtgtcgtcgcccagtttggaccctgtccgtcccgcccctcgctcgcggctggatgagctcgttgcgcagcgtcccccatcgccagactgaccgaccgaccgaccttcgccctttcacgcagcgaccaaggtcggcgccgtcgtcgccggtcagacgagtgtcaaggcgcccgaaaagaaggcatttgagtcgcacctgcccgaagactgccacattgtctcgctgcactcgctccatgggccgaccgtctcgccggagggccagccgctcgtgcgtccggccggcgcagtgcaaagccgggccaagcggaacgctgacccccgcctgtctcggtctcttgcgcactgcgcaggtcatcatccagcaccgggcgccagacgacaaggtccggctcgtcgagcgcatcctctcgtgcttcaagagcaagtacgtttacatgtcgtacgacgagcatgacctcgtcaccgccaacacgcaggcggcgacgcatgcggccttcctctcgtgagtgcctgcgaatgttcggcacgtgcgataagagctaaacttgccttcctctcgtcaggatgggcaccgcctggcactgctcggcgtcgtacccgtgggagacgaaccgctacacgggcgggatcgagcacatcaagatcaacattgccctccggatctacgccaacaagtggcacgtctacgccggacttgcgctcctcaacccgtcagcaaaggtactgatcgagcagtacgcccggtcgacgaccgagctcttcaagctgatggtcgagggcaagaaggccgagctccggacccgcgtctttgccgcgcgcgacaaggtcttccttcagcctgcggcaagcgccggcgaggcaaagcggacgccgctcctcctctcggaccggatccttgatcagttttcgctcggcccgccgcctgaggccggctcgcccaagccgccgcggaacagccacctctcgctgctcgccatggccgacacgtgggcggcgctctctatcaacccgtttgccgacctcgaccttgcggcgacaccgctctttcgcatgtggatcggcgtcgcagagtacctgtttcgcgaagaggaccggctcgacgaggctgtcgacgccgcgatcgacgaccgcgcacacagggccgacgacaccgagttcgtcgtcgccgcccgaggctggagccagtgtgtcgagatgggtgcctgggagacgtaccgcgagcgctttgagcgaacagcaggtgcgtgtgcggccgcgacttcgcccggcttccagaaaactgaccgaccgctttgctccccgcctccctttttcttttccgacagccttcttctcaccgcgcttccccgaggctaccaaggtcggcggcgagatgatcaaggtcatttcggcccagtctgctcagttagcggcgacgtcatcgtcaagctcgacggctaagccttgagatgcagatgcgataaggacgactagtagttgcggagcttacgcagggcagaaagtaagcctcgctcgactagcgcgcaaagaaagagagcggaagccacatcaggccgtgctcacgagcaactggctcgctgaacacaccgggccgaggggtagtaggctgctgcgcgttgtttccggaagagtctcttccaagcatcagcatcagcagctacaagcggccatagggatcaagtcttggaacgcctgagaatccgagcagaagaggaagcgctggcaagggtgggagggcagagtcccaggagctcgttcccgggcttgcccgtcgcagcgagctcctttcttcgcgtcagcccgcgctctcagccatccaaccatgaccagcacgaccagcaccgccgacctgcctgacctcgacgagacgccctgaccgcgctttgaaactggaggccgccgcgcgataccgttgacattgctcgaccgacctatctcgccgaactcatcgctgttggcccgtcggcggagaccgtcgaccggcccatgctagaccatcgcttgaccatctcgacggctcgactcggttccggggaggtgccttcttttggcgatgtcgtcgtcccgtcgacgagcgaccatccagctaccctgctagacacctagacgactctcgacagcccaacgacaagccgcgtcactcgcttctgctccgcctcgctcacctcgagctcgagctcgcccacacgtctcgccgggacgccccctcctccttccccgctcgtggtgcttgcctttctggccgaagccctagccgtctgtagactcttcaagcatggcctccgccgaaatctcgtcgccggattacggtctcgaggtggtcgataacgtgacgaccttctcgacggcctcgcctgacattggctggtacgacaacgacaatcaccacccttacacgctcctcaagccgaacgaggtcacacgccggctgctggcaagctcacagccggaaagcggcgttctcggcgacggtatccgggtcgactcggttgagtggcagccgaatccaacggagctcgaggtgcgtgcccttctcgcggcgggaggcccatcgcagagggcgcacttgactgatctctcccctaacgaccgctgctcttctttttgcagccaaaggaggacagggcggtcgtgcgcgactttccttggcgaggtggcaagggcacgctgctctgtgtctttgacggttcgtccgctgcgaaccactcctcttcagtcgcctgcgcacctgagcgctgacgaacgtcgcctctcgcaggccacatcggcgtcgatctcgtcgagcacgtagcggcgacgcttccgccaacactcatcgactcgctacaagccttgcctgagtctgcctcaccctcgaccgtctcgcaactgctagcgcacgagatcgaggccttcgatgacgcgctcctgcaagcggtcgccgacgtcttcctagcggacgagctcggccagatgaccgccgacgaggtctcagagcgcatgaaggaggacggcgtcgagcagaaggtcatcctcgccagtcgcggcacgaccggtgcgcgcgaccgacgctcgcgggagatgacgggcccggcactgacttctctcgccccgccttcagcgctcatctgcctcattagtccggacaagcgctctctatggacggccaatgtcggggactgccaggctcgtcagtcctaccacgttgcctcctcgctgttaacgcgccattccgggactgacgcgcatccgaacgctcagtactcgcgacccgctcctcgcccgccaagccctggtcgacgcccctttcacccatcacgcatctaacaagcccgcacggagcgagtgtgccggccgaggtcgcccgcctgcaggcggcccatccggcggaggccgcgagcgtcgtccgcgatgggcgtgtgctcgggcagattgcagtcacgcgggcgcttggggacgcaatgtacaagatgccggccgtctatgtcgagaaggtccgtttgtcatcttttcgcattcgtctgaggtgtggcccgtcgattgacgatcagcccggcttgactcggtcgcggcagatctttgctcggcacggcccatcgcgcatccaggcgaagctcgaccggctcctcccactgtacctgacgcctccgtacctctccgcctcgccaaccgtcctcttcactcccctctctccagcatcgtccaccgccgccgccgccgccaacgggccgaccgtcctcctcttgctgtgcagcgacggcctcaaggacctgtacgaccgccggccgttcgcggccaagacgctcgaggacgagtgggtccgacttgccggtctcggcctagcagaccgggagaggcggaacgcagcgctctgcgtgctcgacgatgcgcttggaggggaagacgtctatcggcgaagcgcatcgctaacgctccgcctgccggacggcagcaagttcacagacgacacgaccgtcgtcatcgccagctggtgaacaagagcgcgcatcagatcgccctctgcgacgccaacaggccctggatctcgcgcccgacgccttcgaccagcccagcgacttcccgcccaacgagcccgccgtccggctttccaaagccgacgcggagctcctcgagcgccgtgaggagcgcctcgcgtgccatcgtcaaccggccgagcgggctcaaggggatcgagggcgggcctgtgcggaagagcgtgtcggggagaagcgagggccgcccgccgctgctgtcgaggggagccgggggcgggacgagcaggagctttgcaaactctgcgagggcgacgcctctcgctgggtgtccggccgggtaaagccccggccgcgtcacggcgaccgcgagtaggcacgcaagcgcaagggcgtcgtcgagccgctctggctcgactgaaagggtcgcgatgagggcggtggagagggatcggaggagcgggaggagcgggtaggctgttggctggaagtgggcggcgagcgagcggatgatgggcaggatgtgcaggcgcgagacgtcggctagggctggggtgggcgcagaaccggaggagccggggggggaagcagtcagcctcgccgctgctagcgcatagatccagttcggcacagacgaaacgacgtactagtaacctggcccttctcatcgagagccaacacgcccatcgcttccctcacccactcctcgatcccctcaggcctttccgccccctgaacgaccgcctctctcggatcgccctcgacgccgcctccagctccggcgacggcggccagcccgcgctcacacagcgcgcacgagcacgcaaagaggtattggcgctcgagcgcctggcggcggagcgagggcgggagcgaaatgtcgatgtagctcgtcaagatctgttgtggacaagaggcgggcgtgaagggtcagccctgagcctccagagcggctcggctagaaggtggtgacccgacctcgtcgccctcgccgatcggccggagcgcaacgacctgcatccctcccttggctcccgcggggaacacgacggcggcgtttggccagcaagcatggttgcaaagggcgacggtcgggttgatagcgacgccgagggctgtgagcgagggcgaggagagggtgaacgagttggtcatgaactgcggtgcgtaagagcgggcagggatggtcagttgagggccgggacaaaaaagagggggggaaaggcaggaggtacggcacaacagagctccatgacctcgccgacgcccgcgaacccaaagtcacccatgtcggcctgaatcgtctccctctcgccctcctcgcctccttccgacggcggtggcggctgctctgaccgtgcaggagccgacgaccgcgggaagcagtggccgaggtagacggcgagcgagatggcgagctgggcgtagggcgctggccgggaggtggtcgggtcgagcatcgggagcgaggcgcggtgcgattggaggcgggcaatctgggcccactgcgaaacgggaggggggtctggactacaagaaggggagagaggggcgaaggggcgcaaacggctccggaaagtgaaggagatgctgaggtgggctgagggtcgcattaggggggagagagagaaggggggcgtctagcggtagcaaggcaaaggcgacgacgacagcgtcggcgctttagcagcagcctccgccagcctgctggacgttctggccctggccgaccttgaggttcgactttgcgccggcgccggtcggcatcgaggtcgagcccatgctatcaacgaagggacgagacgtcagccgaagggagaaagcgagagttgcgggttgggaagtgaacggaccggtccttgatctgcttggccatcgtcaggaaagcctgctcgacgttggtcgcctccttggccgacgtctcgaggaaggggatgccgagcgagtcggcaaactcctgcaaaggagcgcgggtgagaagacgactggtcagaaggccactcctcaggcgaacgagggggggcttcggcgcccaggacgacgaaccttggcagcagcgtgctcgacaaccttcttggcgacgaggtcgttcttgttgccgacgagcagcttgttgacgccctcgacggcgtaccggtcaatctcctgcagccactgcttgacgttcgtaaaggtgtctgaagacgggggcgcgagcagcaaacgagtcagaaggtggagcggcgaggcgggcggtgtagctgctacagaaaggaggtacggaccgttgtcggtgacgtcgtagacgacgatgatgccgtgcgcgccgcggtaatacgacgaagtgatggtccggaagcgctcctggcctggagcagggcaagaaaagacgagcaacagtcagcagctgagcggcagaagggcttgagaaacgaggcctgagcatcaagcggcgaggaacgcaccagcagtgtcccactatcgagtagaagaagcgcgcacaagcgatcggcgtcagcgcacgcacagccacgaatgtccccgctacaatcggcaaggactcggccacgaccggatgcttttggcaggacgtacgatctgcagcttgacagtcttgccctcgagctcgatggtgcggatcttgaagtcaacctggtgaagtttcagtggaagggctcgtcagcaatcacctttgccttgctcgcccggcgggcggccgcagcttcagtccacagaacgctcgccctgagcgggatccaagcgcgcaaaaacggccgccaaattctcgcaagccagctcgggcaggagcaacggcagtatgcgcgaaaagggggaaaggaaaggggacgcacgccgatggtcgagatgtagctctcggtgtaggtgtcgtcggcgaaccggaggaggaggcacgactttccgacgcccgagtcgccgatcagcagcagcttgaagaggtagtcgtactctggcgtagacatcgtgaggcgggctgatggggtgagagactggaggagggggtccgcaaggagggagagtttggtcggaggcaaggcgaggcaaggggacaagatcgagggaggatcgtccgagagtgacgagcaggcgatagaggcgtcgggacgacacgaatgaagcacgcgcaagggacgcaaacaggtgaccaagccggaggaacagatggcagaggagggatggagggaagacgtcagcgagctgctcggtcgggtcggccttcgcccatgcccggaggggtcgagcgtcacccagccgcatccccttcccttctcctttgctggttagaccagaagcacatccgaccgaccagggtcgtattcgagcctgaccatccgtcatagcgagcctcgtctcgacgacaggccgaacacgacgtcgaagggggaagggaggaggcgccaggcgagcgagaggccggccgcatcacacacgcccgacccagccttcttcgcgcctggccctcgtgccacccttggactgttgtcgagcccgtttgagggccagagccggttcgccctggccgagagcaggacagcacgacgtcgttgcagacggaaaagactcacgaagaggggaagggacggctgggtggggttgtggtgaggggttgccctgctcgccttctcagcgccgccgccgcaagcaacggccgcgcgggcctggcagcgcgcctttgcctctgcaccgaccgattaccgggtctcgtcgcatctctgcactcgtcaggctcgataacgtagccgccttcacatgtgccgccgagctgtcggacgcagggctccagccaatctccttgcccattggtttggcacccgcccgcccgcacaattgaaccgacgtcctcgcatcgtcatcaacaggcccgatccaggccacccgaggccaccccctttccctccctaagcaggccggctctagcaaaggccggacctcccggaacgcgttccccgttcccttccccccgtcacacgtagcaggcctttttttttagaagggcttgtccgagtcgggcgtcttgtcggtgtagtactcgtcaaactgaagcgagcggcggcaggatcagcgagggcgttcggacaaaaaggccggtcttgcaggatgggctagaggatgaacgtacgtagggcagcggggcgaggaggttcttctgctcgggtgtgcgggcggcggaagcgggcgaggcggtgtcggacaaagcgagccgatgggagcaaggcagagcaagagaggaaaccagcagcgtcagccgtctgctcacagagacccgtgattttggctgatatctattcgtgcttggtcgtagcaagacaagcgagcccgacggctcgatgcccgctcaagcccgactgaggccggccgcctgccgcgagaggtgaagcaagagacgcacgtagaagaccggggtcgacgacaggaggagcgtgacaccggcgccggctccagcaccccactgatggacggacgcgacggccgtttcggggaggagggtgaagtgacggtgggcggaggggaggcagcacgaagaggtcagccgacggagcgcacggccgcggcggcggcagaaggcgcggtaaaggagggactgacgacggcgagcgtaggggcccagcgggcgaacttcctggagagccaaagggaaggtcagggttcagcgagctgcgtcgtgagctgaggtgggttcgtcggtcggcggcgcgcggtagaggccagacgccgccgtccgcgagcgccagcaaggagactgagcctgcaggacccggacgtgttggctgaagagagtaggaacgtactcggcgctgcagaagagcgagcgcggagggcgaagtgagaggcgaagcggaacggaagccagatcggagggggggcgagaggcggcggtcagctgggcggctctcttcgtaacgcggcaatacgggcaacgacgcacttgaacgggccgaagtggcgcgtcgggcggaagacgagacggggcgacatggcgagcgagagagagagagagagagaacaaaggaaggaaggaaggagcggatggcggtagctggctcggctggtcctctttctcgcccgggctggctcggcgcaggcgaatcggagcgtcgccctttaggtccgcgcaggcgacccaagccagccttcgctaccggccgacgacgactcgaccctgcaagagacccatcaggccgacagagaagcttgccccactgctcgggccacgtcggatcgcactctcagctcatcgcctaagtcgaaccgccctcaatcgcctgctccgccgtgcagcatgggtcggccggcggacctcccgctcgagacgctcctctgcgtccaggcgccgatggtgggtattctcaatcttcctctgacggctctgcgaaggctaaaattctcgtccgtcacaggtcggtatctctgacttgccattcagattgctgtgtgcgcgttggggggcgacgttgacctgtccgtctcctctgcgacatgcctcgcatttcgacaaccccgtgctgaccctttaccaactcgcctcgacctacccttcggcttccagacacggccatgtttcatacgacgccctttattgagaacagcgactttcgcgagcgcgccctccgtgatctgacgctcggtcgggctttcgcctcgtcgacggcgccggtcatcggccagattgcagggaacgagccctcggcgctcgtcgaggctagcaaggtcctcggcggtctagtggacgctgtcgagttgaacctgggctgtccgcagcagagagcaaaggacggacactacggcgcctaccttcttgcgaagaaggatatgccgctcgtcacatcgctcgtcgaggccttgacgacgctctcgcctcaaccggcccacttcaagtttcgcctgccgccgtcaccagtatcggccggcaaatacgccgtcgcgcttgcccaggccggcgcacgtaccctgacactccatgctcgacccgcgggctcgccctctcgtcgtcgggacctctggggattgcgcgtttctgctgtgggcgagactaggtctgccctccatgaagcagggtgggaggacgtccggcttgtcggtaacgggggcgtcagggagagggcagacgtcgatcggctgactgaggaggctggcgtcgagggctggatggtgggcgagcatctggccgggaatcaccggtgcgtcgcgcgacccgcccagcagtcgaggactcgtcctggctgatctggctgcttatctcctggtgcttgccggcctaccagcttcttcgatccgacccaggccggcacccgggcgctcgatctcgccgacgagtatctctccctcgtcgaacactttccggccgacctcgtcccgctccagtccgttcagcgccacgtacgcaactttgtcgaggccgatctgctctcgtgcgtctgtaacttgtcttcgcttctccgaggggcgctcatcgttgacgcctcgtcacgcccagcgcacacacccgtgagcgcaagggcttcctcaagggtctcgaggcctgcatcgacttccaggcggtccgtgctctctgcgagggcgatgcgatcgtagaggcctgggcgcctgctgtgcccagcgctgggtgacatgttctctttcgccgaggagtcgctcgctcatcaggcttgtgaaagtcgatcatggacagcgcgaaatggaaatggggcgtgggaccaggttgatgggcgcgatctggacgagtgcgaggcgggtctggaacaaaagggcggaagacgacaaggagtgtccggattgtccagaagagggtagcgagaaggaagcaaaagggaagggtcaagttgatgtgcgagtccaaacctgccgttagtcatacaccgcacgtcagccctcaatttataacagaccatgacgagcacagaaccgaagactgacctggtctgagttggttgagcatcgccaggtctgtattactgcgccattgctcttgttaccatcccgcaaatcgacgcattgactgccgccggtgatcgcgatgtggtcattcccggatagcgtgtagaaccactgctgttgcatcacagcagcatttagccagacctgcgaagagggacgaaggggtcagtcgcggctttgacgagagcaacgcagggggctgacctttaaggcgattccatttgccgggttgctgccagcgtcgaggcagaacgattgcgcgtccctctgttgatgagccatgcctgattcggcgagtctgccacgcattggaagctttaagggtgcgcctcagtgtgtcaacatctgggggcgtagaggctaggaggaacacttacagccggacggcgtcgccgttgaaaattctgaagcccaagctgtcgccgccctcccggacgacggtaatgcagaggctggtgttgctgcccggatggattctgaacgacccttcgctcccaggcgggaccgggttgggcgtcggagggaagtttggcgccgggctcgggggaggcgtgccgctgcagcttgggggcgtcgcaggcattagcgtgcacgctcgttcggctcggtagggcaaatgagggacattacgaggtcgtccatgcttggtctacagcaaagagtgcaaagggcacgtcagctagactcaaaggatgatctggacaaaccgctacgcactcggattgcccgactggcaggtgtatgtctgggccttgtcggcgaaggcgtcgttatcgaggcacacggctgagcgggagctagactgtcagcccgagtggactgggagcgcaagagaagtggctgctcgatgtactgcctccggtgatcgcgatacggttgtcgtctctgaagtaccaattttgttgcggcactgatccgaatgctccgcacgaccacacctgaggttgagcggcatcagcagggaggaagactcagcttacagagatgagcgcaccttcatcttgacgccgttcgaggggttgacgcctgcgtcgaggcaccagtcggtgttcttgagtttgatcctgccggcccctcgagcgatttcccagccttgaacgccgctcggaaagtcacgagcgcactgggtgaggtagacgctgtttccgatcgagatgacgccgtttgggcccggcgcgacggtcaggcactgcaaggcaagaagacagaagactgctgagcaagaaggcatcaagctagcccagtggccaggtgagctacgcacgcccttctcgttgccctccggctggatcaggaagccggagctggacgggtccgtgatgtaggtgggcgtcattgtcgtcgactgagcctgctctgtctgtcacttggctggacgccagaggctgacactcagcctgccgggtctgcagagctctggaaagccttcgtcgacctagaccgtgaccacgacggcggctgcctggatgggccttagacgggcctctcgcggtccgggcgtttcagaaggatgtctggcttgcaaggcggggcttctcgtcgatccagctactccctttctttcttttcgcttcgtccttcgcacgcatgctgaccctgtcgccctctcctcccctctctgtctcaaacccaggtctcgcctccgtcaagatagatacttgatcactcgcgtctctccctgtctcttgcacttgccctgctcctcttcagttcgaccgccccctgccctgcgtgcgcgcgcgggcttggtgggcatgtaccgatgtatactctctctctattgctgccggctagggtcagacgagctctgcggcgcgcaggagagaaaagacacgaagttgagggaggggacgggaacatcttccatcggttctcgcgagtgccagaggggcagcaagacggtctgcgtcaaaaagggccatggaccgaccgaccgaccttatcaacccgacccggttcatcccgacgtgcacgctcgcgacccctctctccgcgccttcctgccctcttgtagagcgagccggcgagcgtatgccgtcagtgcgaccgacattcattctccgtcctgcctgctgccgcctccctcactttcgccgccatcgccgccatcgccgctgtcgcctctgtagcctctatcgcagccgacgacgtccccgccctcgagcatccagcggagcgtcaagcttacgcgcgtcccgcggaggcgccactctttgtggccgtcttcgtccttgtcctcgtgtggctcttcagaggaggatatattttcacccatggcgagcgctgcggcggtcgccgttatcgtcggtgatggcattggggtcgccactgtgggtgctgccggtatggacggacctctgccggcaaccaggtcagcgagcaccggctcgatcccgtgctcccagccgtagcgcgcctcgccgtcgaggacgagcaccgaccgggccgggaggtagaagcggtgcgtctcccaagcgtcaggttcggaggcggacggcgcggcggcggctgtggaggcgctttggaccgccgccagcgggtcgaccgacgtcgtttccgccgtcgaaagcgaggcaggaggccgtcgccgccggcgaaagaggaacgtcgtgcccgagaggagcgagagcgagaggatgggcgagccgtagcggtgtgggaggtcgacatgcggggcgatgcccttctgcgaagcgcgtggccgagcaaagagcgaggcgaacggcgtggccgggatgcggcgccgtgcgaaggataggacgagagggaggtgcagagcgttaaatgctgattgaaagttcgctgggtaaaaaggtagaagacgcacgcctggcgtatagaggtttaggatcgctggtaggcgggcgggtagtcagacggcgtcaaaggggtccagccagtcagcagaggcgtcataaaggtgcaaggacgggcgaagcagatcgagcatctgactctctctcaccttgccgactccggccccctgccctccaggagcgctcccaaacggtccgcagcctcttcctctcctcttccccctctccacttttgtcgcctccctctccgtccgttgctcgcagcagctcgtccccccacgccctcaccgcccccagctccttcacacaccacccaagcgccgtctcgccaaaaagcatcacctggtctcttgttccgcccgcgaaaaggtcggcgcgggcgatggatgcgatgagggccgaggcaagctgaggagggagcagcgaggggaggaggtggaggccagggatgggaggggggagaagagatgcagcggggtgttgacgctgctcatcttgaaccctactgctcccgcagtcgtcatccgagagggccgagaagagggacgaaggcgatgaatcgggcgacatggcacgtccgagatggtcgccgtcggagggttgaccgctctgctccggcgcgcagcagacccaatgtctcctcgtccgactcgcatctgcaagttgatcgatcgccctgcatcgtcgtcgggggcgcgcgccgcgcagaagccgccgccgccccgggagcgagggggaggaaaggagaacgacagccagccaggacgacgacgacccaccggcaaaaccgcttttgatcgaccgcagcaagcgacagagacgggtcagtcccatctcgctctcatctcccatcgcatgcacgcttcctgcagaggaaattcttgcgagagaagtggttgcagaaggacccaaggccgcgggttcggtcggtcggtcggcacgggcccctcccgcgagaccagccaagcacacatccctccctcaatccgtcctccaccgcgcaccccctgctggactcgagccatacgcgcactatcccttcctctcacccaccgcgagaggatggacctggtttggaggcgggcagaggtcgatggcggccgggaggggacgtcgggggtcggctaggcgaggagggagggaggatccgcgcgcgcgcagggcagcaggggcgaagagcgaggagagggagagagggaggagatctctcgcgtgccccttcgtcgcccgtcgttcggcttggtacttctctcgctccctctctgctcgctctcgcaaactgttcgagaaccatgccgttcatctcgtctgccgttgacgaccgactgacgacagtcgctgaaccccctgctgctccccttcacctgctcgctcgatcggccgtcgacgaacacccttccgcagtccaccgacccgacctctccttctcgacttcttttcgcacccttcccgaaacgcctctcgcactcctgccgacaggcgcactcgcaccctcgggactcagaacagacggctttgcgagtcgctgcgcccccatcaaaaggaccgacgctcgccgcctgcgcgcttacacccggcgccccttcgtcctccaacccgcccagcgggccctagcagccagccgtcgcctttccagcgaggcctgggagtcctcctcttctcactcgccgcctgctccctcctcgccgtccgctgccgccgtgcgccatgtcgccggccgccgctgctgctgctgccgctgccagcgcagtcccaggctcgcccgcgtcgtccaagctctcctcgcagtcatcccatgcgtccgacgcagatgattacgacgacgacgacgacgacgacgacgccttccgtctggcaccgcggccgcgggcgctcgcgcccgacgaagaatacgaccccgacgatgttttccatccggcgccgccgcagccggcgcgatctccctcgccatcgccaatcaccggcaagcggaagcgctcgtcgttgtcccctgctgccgaaatcaccgccaccgctgtcatcatctcgccctcaacggcgtcgttgccgcccgtcccgctcgagctcggctcgaaggagggcgactggccgccggcggttcgagctgcgctcatcgggtcgggccctgcgcccacagcgcctatagtgacaacaggtagtagtcggccaagacgaggctcgaggtcaacaacggcttcggggcggggtgctgggtcgccgctcaatgccgccgatgaagacgacggaggagggagcgcgagcgatacggcactgtctgtcgctgagtcggtccggtcgacccggtcaagtcgggcagaaacgaccgctagcggaagcgcgaggcggtcgagtcgctcaacgacgacggcagtggcgtcgacagggaagggctcagcagagggcctgacggcggcgaaagcgacgcgctccgcggccggctcgcacagctcgagctcgaggtcccctgccggacgttcggccggcctccaggctctcgctgccgccagtgcatctacgacggcaatcgcttttgcatcgggcgcgacgtcaggcgctgctccgtcatcgactcctacaccggcgacgactgccgccgctgcgggctcgaaagtcaagcggcctctcaaaggccgagcagcaacgctcgccgctgcgcggatcgctcgcgaagctgccgaagccgctgctgctgccgctgctgcttccgaagctaaagcagcggccgcggacgggctcaacctctcccaaacgagcagcacgtcatcgcacttctcaatctcacctccaccattgccggctcctccttcggttcccctcggccagccgagcgcgcttattttcgccagcacgagctcgagcgtcgcgctcgacgctggcggcggcgcaaagagctcgtcgccggtccttgcggctctgatcgggcgggggccggacggcgctcgttcgaccgctgctgccgacgaggcttccagtagcagcaggcggcgagcgagccggatggtcgacaataacgaggaggacgcggacgtggaggaagatcctcggaggaatggagccgctcaggtagcgattaacggcaacgacgcaatgggcattgactctgacgacgggcagtctgtcgcgacggtaacggtagctggcaacacggccgccgccgccgacgccgacggcgataattcggccgcccctacgccaactccctcctcgcctgccgccgacacgctctccatctccgccgggcgcggcgcgtttttcaagcgtggcggccggggcgggcgcggtcgaggcggccgagctcgaagcgggatgttcgtctctgcgccaacgacgatggcagcgagcgctcggacatcgcctggcaagggacactcctccgacgaggacgactccgacgatgacaagggtgtcgctcagtcgccggcgttggaccggctcatgtctgccgccgcagcaccagaagtcgtcccgccaaagccggctcggagccggaaagcccaggagttcaaagcgctgaagcgccagcgcgaccatgagcgcgcggccgagctcgatgcgtgcgtcctttcgcttcttcgcctctttgccagccgtgttgtcgcggtcgctgactcgtcgcttgggccatcgtcgctcgccggacagcgagctcgctgagctggaaaggctccgcaaatcggtcgtcagcgggaaggcgccctactttgtcgagattgtagacgagctcgccaaccggcgcgagcgggcgtatgatctgctcgacgagcgacacgcgtcggtctcctctgccctctgctttcgacctcactgagctgacgttcctcacgcctctgccctgaagtgccagccttgagtcaaacaagcgcgttcatgcggccgatgaggagagcatctggacgtggtggcaggtgcgccatctccgaacactacccgcacggcccgacgctgatttgctttgcgatctccccaggacgcccgcgacaagctcgcgcgcgagcagtgctaccagacgtgcagcaagatgtctgagctctcacgcgattaccagaagctgctgattgcccagctgccgccggccgagcggaccggccacattccgatccacctcggcggcggcgaccggcatgcgcccaacccgcgctatccgacgacggccctgtacccgaaccaccctgcgattgccaagagactccgcctgacggtcccgacgacggacgcgagcgtccggtgggcaagcgaggaggacatcgaggacgacctgacgaagctcgggctcgggcgagcggcaaaggagcgccgggcgaggaaggacgccgaccgggcgaggcgcgaggccgaccgggcgcggagggatgccgatggccgcgagcgcgagcacaggcgcgagcaacgaggcggaggcggcggccatcagcagcagtcgttccacccgcagccgggccagccgatgccgccgggcatgctcgtcgggctgccgccgccttccggcgcgctccacggaggcggcccgcacgagtttgactcaaagcgcgagtttgcctggggcgacccacacttcccgcccggaggcttctacggcccgccgccgccgccgggcatgcagccatatcctccgccgccgcacggccagccgggtcttcagcaacgcccgctcgacggccagccgcagcaccatcctcccggcatgccgcctcctccgccgggggcgtactaccccggctatccgccgccaccaatcatgggccttaacggccaaatgctcatccctcacccgaccgagcattgggagcagcagcagcggaaaggcagcgactcgcgctcgccgttcaacagcctgctaccggccccgtcaccaccgccagggatgctcctgcaaggccatccaccgccgccgcctctttcttctccgaaaggccacaacggcttgccgtcccagcctccgccgccatcgattgggccggacggcaagccacagcgcgggccgcaccatcaccattaccaccaccttttgccaccgcaccaccaccacccattgccgtcgcatcatcaccaccacctggcaccgcagaatgcaggctgggcgtctggcccgccgccgccacagtcacagccaccgccgccgccgccgccgccgaatgctgctcgcggcccggctccggctgtaggcgtgatccaagcgccctcgcagcccgtcccttcctcctagccgccgcgcttgcgctcgctctcgctatcctccccgggcccagtctgggctcttggcttcacgtttaccctattgagcccgcgttgcctcgtccgacctgtcttggccgaccgacgaccgtctctccctacacgccctcctccttacacgcccacctccattggatcgcaatcttcatgaactaccccctgtgcccacctaccccctacgctcctctacgagccggaagccgacacatagaagcagactttatgaagaggcttcacatcaacacgcacccccctccccctctcctccttctctcctccctccctctccctccctctccctccgtctctctctctctcaccgtctccctccctctccctccctccctctttctccctaccccctaggactcgttcgattttttctgtgtttcgctctctgtcgaagcgctcggcaaggaatttggcaaggagaccaagcagatcaccctctcaatcacgctcacgctcttgttccgctcgctcggcgccgtcatcctcggcctcctcagcgaccgctacggccgcaagtggcctctcgtcatcaacctgctcgtcattgccgtcctccagctcgcgacgtccttcgtcaccgactttaactccttcctggcgtgagtcgtctgcatccctccttcccctcctctcccgtccctggccccttgggggggctgcatccccgacatgaccgatcgcaacgatacaggctcgacacacgcgactgacatccccgcgcaaacctcacgcccctcctacagcgtccgatccctttttggcgtggccatgggcggaatctggggcatgagtgccgctaccgcactcgagaatgcgcccgtgcgcactcgtggattgctctcagggacgctgcagcagggttactcatcagggtttgcacgtagaaaagccctcaattacagctagaaagtttcattgctgacccatgccgctgccccttcctcgcagctcatcgccgccgtcgtcaacctcacgctcgtcgccgactacaccaaggcgcacggccgcggctggcggacactcttctggatcggtaccggcctcagtatcctcgccgctgtcgtccgtgccgtcctccccgaatctgccgcattcgtccgtgccaaggtcgagcttcgggcggccgaggctcgaggggagaaggtcaacgccaacaagcagttcctgcgcgaactcggcctgatgctcaagaccaattggctgctttgcatccacgccgtcttgctcatgagcggaatggcgagtcccgtctcgttgaccctcataggatcttggtctaacccttctgtctcctcatgaacagaactttctctctcacggaagccgttcgtcctttccatatcctcctttgttcggctccggtacttacccagtgaacgtcctccttcgccatgcagaggacctctacccgacctacctccagaagtcaaaggccttcaccgcccatcaagcaacgctcgccaccatcgtcggcaactgtggtgccatctttggcggcgtgctcgccggctacgcttcgcagatcctcggccggcgtttcatcctgctcttgtgcctcatcctcgtcggagtcttcattccgatccggacgctacccaactcgtttggtgcgcttgcggcagggtgagcaccctcacttcgacggctcttgaccaggccgcaagctgatctgagcgatctttcacagtgcattcctcatgcaggtggccgtccagggcgcttggggcgtcatcccgatcgtcctgactgagatgagccccgtcgccttccgcggaaccttccccggcgtcgcctaccagcccggaaacgccgtctcgtcatgcgccgcgcagatcgaagcgaccgccggcgagcactggaagacgacgctgaacggagtcgtcatcgacgactacaagaagatcatgcaggtcctactcagcgtcgtcgccgtctggacgttcgtcgtacgtttctccggttgacaaacgaagccgccgatgcgtcgagttctgaccctcctgcccctttccttcagatggtcctcttcatacaggagaaccgcggcgccagcttcgagtgggccaaaccggctttcgttcccggcgcaggagcgcgccaagacgagaccgactcggtccgcagcgtcgtcgacgtcgagaaaggcggcaaggtcgagatcgagcacgaggagaacgccaaatcttccaattccctgcacccagacaatctcttcttccccttgtttcgtatatcgggtattgaccttgtgatcattgcttcagctctgagtcgcgcaggccgcagcgcgagcaggccttgacgtccttggaagcgtcagtcttggcgaccttgcggcccgacctgtcgtcgagctggacgctctggttgtagcggacgtcgaacgcctcgaatcacggcttgatccgcgcctgctgggcctcgtacgccacatgagcagccggcacgtgcagcgggcggcggcggcgggtcaaagatgggggccggggcggcgtcgcccgactccgagcgcccctttcccttggcccaccccaggagcggagacggcgagaaaggcgagtgggggcgtgaatgctgaaagagaaagacgcccagctaaattagcacctgaggggacaaagaaaaggtcggctggcaggggaatgagggacgagggacgagggacgcacgtcgtgcccgtgagtatggctgtggccgtcgccggcgcaggaggaggcgccgtcggccggccggtagtcgtcggatgagctcggaggtatgttgtgatcggagattttagtgacgagcgcggctagaaatgctgggtggtaaaggaggagggagggcgaagacggtcgtcggcgagtaagaggatgcggctctccctttcattcgccacgtgccgcgcgcagcaggcctgcctttgtcctcctgtcgcattcgcactcgatcgcctctttcttttcacgagggcggctgacttccttcctcgccggacgcccgtcgtccggcttttcttcaccacgtccatttcccaaggctgcccgtcgcacattcccgtcgcctcgcatccctctcgaccatggcctcaagtcgtcgccccgccaccagcccgccatcgctgccagctgccgtgactgagcctggagagcccttcacgccgacccccgagctcctcgctacctgtgagacttctccacccaaccgtcgggagcagtcgggccctccagggctgacgccgcaacgctcgacaggggtcatctctacccctttcttcagcaggtcgagattgagctaatgaaggccgccggcggcaaggtcactgttcatcccgccgacggcgaatgcaagggcttctggatcttcatctggcgcgaagcgaggtcatcctgtcgatgcgctgctgcgccaggccacctgcccaatggatgctgacaggcgagtcaagaccaggacacgcgctcgccggatttcgtctcggttgtcaccaggctgcaactccaggcacgcacgaccctacacgccgcaggtgtgccccaggccaagttagtctttgcgtcaatcggcggcacgtctgcgaccggcgtgcaattccaggacacaaccgagtagatcctgtggtgtcttctgcctcctaaaccgagcgctgacctctgtccgtcgcacgcgcagcctctagcggcggcccggtcagggcgctgctccgtcggtgtgcactcctcggcgcccaaggagctccatgccttggctcctcaggccgatggcattgtgtgtatcggcacggcgggtgagttcgtctgcctgcccgtcgcagaggcgagcgtctgacctcatcctgacggcctcacgcacgtcttctgccctcagccaacacgtccaacccctttcagctggccgccatcctcagtggcctcaccattgacgtgggagagcacgaccttgttacgccttacgtcgccggcgattttcagccggccttctcgccgtcggcgaccctcatcgtgtcggtcgcctcgccgctcagccagcccatcatcctgccaaacgcgggcgacactctccgctctttttgatctcacgtcaaggctgccgtcgagacctcgtatctgctcgcgcaggccaggctcaaattcgagcgggcgctagaccatgtcgggcaacccggcgacgagcggtcggctgccaagacggtgaagacgtgcaagcagcgcaagcgcgccgccgaggaccgtctcggggaagtgcggcgggcgcccaacatctccgtttacgagagcaacctggaggagaacgtcaagtcggctgtcgttacctatctggccgacgtactcgttcaggagcggtacttactcgcaattcggatagccaaggccgacgtcggaatttctggcaagcggcgctggcctggtggcacggcgatggcaggctccggcgaagctcacctagagctcctgcgccactggtgcggcatcgacctcaacagcaaacgcgtccgagacgagggcccggcaacggacgggcggtacctgcccgggcaggggcgaccgcgaagatgctgctcgagagagggcggaggcggatgcaaagctggaagccctggagcgcgacggcggcacgatttcgcagaagagaaagaagtagccatggcccctttgccgccgtcaatcgccgtcagccagtgccatgctccccgtctaaggtcgatagagtcgagagacaggcgcatagacattggcgggagcgctttcggcgccggaagcgcaggcgataacgaggggaatcgaccgggccctgcgagaaggtcgtcgacgagccgctgccgcccaagagctagacagccaaggagcggcagcaggcaactgccgtccagcagccgcctcaccacttgacccagccggcggcgtagctgacgctgctatcgctaacacggacgatgcgctcgctctgctcgtacttgacccagccgcacgcgggcgtgtagtcgggtcggagaccctgcccggccgacctctcgagctgcgagatggcggcgaagaggacggagagcgagttgcggccgcagatggtgttttcggtgcctggtgcagacaaagtaactagttatttccaacgcagcgcaactcgaacgagaagattaagtaaaagggtccgcacgcttcagataggcgttgaactcggtgtggacgtcggtagcccgcctgggtcgagcaacccggccaagcttgtcattcgcctcctgcgactcgccaaacgtctcgaggatgtccatcgcctcgcgatcgaggtcgcggatcgattgccagatcggccgggccgggtcgagatcgcgcgtcgacgagacggcctcctttgccggcccagcgggcgagggcgtgtagtacgtgtaatcaaagcggtcgccccagtggcagaagtcggtcgagatggcgacgagggtcgtcgggtcgtcaaagtctgccagagtgtgagacgttagcccgagcaggccagcggcgtgccagattgagacgcacactcggcaagcaggtcgccaaagagctcctcgttgctcttgctcaggctgccgacgacgatcggcacgagcttgacgtcagatgcaaacagccgtcggatgaacggcagatggagctcgacgcagtgctcggcctcgtcctgcttcaacgttaggtcgcggaagtggcccgttgcccggagcgcgtcgacaactgacggcgggaaagggcggacaattgaaagtcagaagcagaagggcaagcttcgatagcacgaaagatggcggaccctcgacgtcgattgggatgtcgccgagcggcgttgcatacgtcgtgcacttggtgagcgcgcagtcgggcaggtagaagcggtgcgacgggccgagaacaaagatgcgcttgctgcgaggtccggagaacaagagccgagagatagagaagcgcttcttcagcgtcagtctgagtggctttgtgatcgacagcgctcaggaggctgacattggcgtcgggtctacctgcgagtaggcccaggcagccgtctcgccactgtacgcgaagccggcgtggctggagaagggcagcccgtcgcgaggcaaacgatgtcctcgtcagatcgacaactcctgaacagcggctgctcgcctctcgaccggagcggtcgacgaagaaagcggataaggacgaccgacgtacgggccgatgacagcgcggacgccagcgcgcttcgactcgtcgaccggaaccccgcccagccacccatcgagctcctttgtgagctttgcagctggaggcggatggccggaagggaagatcaatgagagggtcagcatctcgtgcacctaaggggtaggttcgccagcgagggcgaggcagctcggccggcctgctgcggagggcagcaagctcctcctgctcggccagcggagcctgcgagacggtggccgttgccgggcagggttccgagagtggcaagatgatttacggttggccgagtaccacgagccggcatgcgaggccttgcgggtcgtcatctgcaagggggtttctgggagggtcgagggcagggaggagagaacgagatggtggttggtggctcggccgtcgagcgacgggacatgcttcccttctttgcttcatcagcttgacctccttgagcacctcctcgaaagccgctcatgctctctttgtagagttcagcatgctccaggtctagctctcccgactgctacctcctcgtccaccccgagtcgaccgccatccggcccttctcaacgacgcagcgactgcgcgggcagacacgcaccgcctcttgctgctcgctccttccacgaaagagactctgccgccgacacgtccctttcggaccggctttgctcgagccagacgacagccatccaggaaagtcctgtcactccctctaaattcgacgacgacacgacagccagaccagcccctgcccgcctgtccccctcaccgaccgacgcgccgcaccccttgcttttagccgggcgcgtcgacccgccggctcgtcacctcgggcgccccgaacgcacgtcccgccccttgctcgctcgcccttcccccaccctccgtgcccgtgctcgcttcttcgccttttaggcgaagccccttagccacttgaactccttctcgcctccaatgtaccaccgtctatagcgcctctgaccctgtgctcccatcgcatgccccgttaaaccctaacccctcgtcaagctgccgacggccgtcaaacctctcatcggctcacaagctcgcctctttgccgacgccgccgaccgactcgcctctgctttcgtcgccaagccatcggacgagaccctcttcgactttctttgcctgcccaaggtcggcctcgttcctggccttcgagccgacgtcgacctcaagcagcggttggcagtcttccctgttgttgcttggcccgagctgccgcccaacgccgatcggggcgtccgtcctcccgtcaccatctccgaggccgtcgccaagcaggtcacttccggtcgtctctcccgggccgctcgtctgctgtctggttcggccaaggtcgctcctctcacgtcggacgtctcagccgagctcaagcgcaagcaccctgtcggacccgctcgccctttcgctgcaggcatcggcccgtctccaggcatggcgcccaaggcagacatcgtcgacgaggtcttccggaagttcaagctcgacacggcgcctggcatctcgggctggacgcagccgttgctctcggtcgctctccgtcggccagccgtggtctcgttcgtgtcggtgttggccggtctcgtcgctcaaggctcagcacccggtcaccagcttctgtgcacctctcggttgacgcctctcatcaagtccgatggcggcattcggccgatcgctgtcggcgagcttctgttccggctggtggccaaggtcttgcttcgacactacttcaagccggacatgcttctcccggtccagctcggtgtcggttccaagggcggcgtcgagcctgtggtccgagcggtcgaacgggcgcttgcagacgacttgcccaagacctacacccacctcgtctcgctcgacttcaccaacgccttcaacaccgtcgaccgtcgcgaccttgccgcagggctgcgcgactttgctccggctctctaccgtgccggtcgctggatctacggctcgcccgctcagctcgccgtcaccggtgccgatggggcggtcgatgtactggagtcatcgcaaggggtccgacaaggcgacccgtttggcccgctcttcttctcggtcgccatccgtcggacgctggacgacctcgttcgacacctcggccctgaccgattactactggcctacttggacgacatctatgttctctcgtcggacgaccaggccttggccgaggttcaggacttcttcgacggtcgcggctcgtcccttcaactcaacgttgccaagtccaagtcgcactcgctggccgacatccgaggctctgggctcgagctgctcggtacggccgtcggcggtccagcattcaggcgatccttcctccaggccaaggtcgaccatcaagtcggcctccttcggtcactcggcgacctcaagtctcaacatgcgttgctgctgcttcggttctgcatccagcaggatcttcggcacctccagcgcacgcttcggacggacgatctgcccggggtctgggacgacctcgatgcggccctcgtcgacgcagccctccttcttcggtcctcaccccgacgtctcgacaccgacgctgaccttgtcaccctacctgctcgtctcggtggcctaggggtcctctcgcacgccgagtgcgctccgctcgccttcgcatctggctcggaggcggccgaccgggcgctggccccagcccttctgctcgaggtcgacgacgacaaggccatcgtcacccagcgggcccggtgcgacaaggccttcaacactcggctcgaacgtgtcctccgtcgacttcctcgtctcgagcgcgataccgtcatcgagtccggcacggtcctcggccgacgttggctcggtgtcgtccccttccggtcggtgctcgagctgtcggacgccgaggtcgcttctggtcttcacttccggacgctctgccccggctcgctcgacttctgcgccgactgtggcgacgcagctccgttcggacacgacgaggcctgctcgggtcgtgctccagtcgctctcggtcgacacgagcaggtcaagcggctcatcaacaacaccctctcctcaaacatcaagtttcgtgttgttctcgagcctcttgtccccggcagccagcttcgaaccgaccttcgcatcaccggtcccgacggtgtccgcgagattgacatcaccgtcgtatccctcgcctcgcaggacgctcgatcggcctctgcccgcgctcactcggacctatcgctctcgttcgccctccggtcccggaacgccgtcgacgacaccctcgccctggccgcccgaagcaagaccctcaagtacgaaggccggatcgccgctcccttccgtcccttcgtcctctcgtccggcggcgcggtcgaggcaggcaccctcaagctgcttcacgcctggcgggatgtcctagccccgtcgtccttctcgcacctcactcgggtcctttctctcatcctcgtccgagctcgggcccgactcggtcgactctgatcgtccggcctcgacctctgtctggttcaggatgacggtcgctcggtcggtctagcctcggtcgcgctcgcccaccactcgtttcatttctcttctctctcattggctcctctctcttccgcgtttgttccgctccgccttccctcaccctccgcttccgtgtgcccgcttccctcttccgtagctctttctctcgcctctctcttccccctctcgacgacccccctcctccgaccactctacccctaggcagccgacccgatcctaacccgttcgtctctgtgcccgtcccgcctcttcttgaccttgccttacactattcgatgctgcagtaaccctaaccctaaaagaactccagctcggccccgggctccgtcaacaccagtccgtcggtcgtctgtctccaacgctgctgccgccacctcggagttcgagctactgttgtccgaggacgagctcacgccggtccgtcgccctcgtcggtcttctgctcctccgacgccggccgactggtccttcagctcgtggtccgagtccgaacgcggcgaccctgctccggtcctcgctcctgcttctccgaccccggcctctcctccgaccttcgagccctccgacgacgattcttcggcccctgtcgacgaccttctcgaccggttcatgtcgctcgtcaagctgccgacggccgtcaaacctctcatcggctcacaagctcgcctctttgccgacgccgccgaccgactcgcctctgctttcgtcgccaagccatcggacgagaccctcttcgactttctttgcctgcccaaggtcggcctcgttcctggccttcgagccgacgtcgacctcaagcagcggttggcagtcttccctgttgttgcttggcccgagctgccgcccaacgccgatcggggcgtccgtcctcccgtcaccatctccgaggccgttgccaagcaggtctcttccggtcgtctctcccgggccgctcgtctgctgtctggttcggccaaggttgctcctctcaccacggacgtctcagccgagctcaagcgcaagcaccctgctggacccgctcgcccctttgctgcaggcatcggcccgtctcctggcatcgcgcccaaagccgacatcatcgacgaggtcttccggaagttcaagctcgacacggcgcctggcatctcgggctggacgcagccgttgctctcggtcgctctccgtcggccggctgtggtctcgttcgtgttggtgttggccggtctcgtcgctcaaggctcagcacccggccaccggcttctgtgcgcctctcggttgacgcctcttgtcaagtcggatggcggcatccggccgattgctgtcggcgagcttctgttccggctggtggccaaggtcttgcttcgacactacttcaagcccgacatgcttctcccggtccagctcggtgtcgggtcaaagggcggcgtcgagccggtggtccgagcggtcgaacgagcgcttgcagacgacttgcccaagacctacacccacctcgtctcgctcgacttcaccaacgccttcaacaccgtcgaccgtcgcgaccttgcggcagggctccgcgactttgccccggctctctaccgcgccggtcgctggatctacggctcgcccgctcagctcgccgtcaccggtgccgatggggcagtcgacgtactcgagtcatcgcaaggggtccgacaaggcgacccgtttggcccgctcttcttctcggtcgccattcgccggacgctggacgacctcgttcgacacctcggccctgaccgactactactggcctacttggacgacatctacgttctctcgccggacgaccaagccttggccgaggttcaggacttcttcgacggtcgcggctcgtcacttcagctcaacgtcgccaagtccaagtcacactcgctggccgacatccgaggctctgggctcgagctgctcggtacggccgtcggcggtccagcattcaggcgatccttcctccaggccaaggtcgaccatcaagtcggcctccttcggtcactcggcgacctcaagtctcaacatgcgttgctgctgcttcggttctgcatccagcaggatcttcggcacctccagcgcacgcttcggacggacgatctgcccggggtctgggacgacctcgatgcggccctcgtcgacgcagccctccttcttcggtcctcaccccgacgtctcgacaccgacgctgaccttgtcaccctacctgctcgtctcggtggcctaggggtcctctcgcacgccgagtgcgctccgctcgccttcgcatccggcttggaggcagccgaccgggcgctggccccagcccttctactcgaggtcgacgacgacaaggcgatcgtcacccagcgggcccggtgcgacaaggccttcaacactcggctcgaacgtgtcttccgtcggctccctggtctcgagcgcgacaccgtcttcgagtccggcacggtcctcggccgacgttggctcggtgtcgtccccttccggtcggtgctcgagctgtcggacgccgaggtcgcctctggtcttcacttccggacgctctgccccggctcgctcgacttctgcgccgactgtggcgacgcagctccgttcggacacgacgaggcctgctcgggtcgtgctccggtcgctctcggtcgacacgagcaggtcaagcggctcatcaacaacaccctctcctcaaacgccaagtttcgtgttgttctcgagcctcttgtccccagcactcagcttcgaaccgaccttcgcatcaccggtcccgatggtgtccgcgagattgacatcaccgtcgtctccctcgcctcgcaggacgctcggtcggtctctgcccgtgctcactcggacctctcgctctcgttcgccctccggtcccggaacgccgtcgacgacaccctcgccctggccgctcggagcaagaccctcaagtacgccagccggatcgccgctcccttccgtcccttcgtcctctcgtccggcggcgcggtcgagtcaggcaccctcaagctgcttcacgcctggcgggatgtcctcgccccgtcgtccttctcgcacctcactcgggtcctttctctgatcctcgtccgggctcgggcccggctcggtcgactctgatcgcccggccttgacctctgtctggttcaggatgacggttgctcggtcggtctagccttgatcgcgctcgcccgccttcgtctgtttcatctctcctttgtctcattggctcctctcttttccgcgtctctctcgctccgtcttccttcacttccgcttccgcacgcccgcttccctcttccgtagttcgtccctccgcctctgtcttccccctctcgacgacccccttctccgtccactttacccctaggcagccgacccgaccctacctcgttcgtctctgtccccgtcccgcctctccttgaccctgccttacactattcgatgctgcagtaaccctaaccctcggatgcgtggcctatgcctgggtcccgtcggagaagcggacgaagctggacgacgtcagccgacggtgcctcctcctcggatacgcaacggacgcacgagcctggcgcctgtacgatccgacggctcggacggtcctcctagcacgcgacgtggtgttcgacgaggccatgccgacgtcgagagggggacaagatcgagctgctgcagaaggacaagctgcggaggcgagagagggagacctgagcgtcagcgaaggtcctcgtgcggacgcagctcgaccaacgatcgacgtcgacctcggcccgcccacagggcgacaagggctccgccagcaccctggatgtgctgcgaaggaaccagccggcgcaggtggtgatgggcaaagttgtagggggttggcaaagctcccccggaaacatcgctcaggagccgccgaggatggccagccgagcgacaacgaggcggccggccgaggcggcgacgaagcagacgacgcaccggaccacgacgcgcctggggagccgtacgatggcgagctgctcgtcctagagcctgctgatgcgcaaggtgtcgcagagctgccgtcagtcgagtctgcggacgagacgacaggcagggggggggggggggagggggaaagactcagtttctgcatagcccggcaacagaagccgtagcaggagagaaagcggtcgagggaagccataccttactggaggcttcgataaatctcaaggagcagcgtcagtggcggtgcagcttccgaaacaaaaacaaactggataaagtcaagaaaaaatatgagagtctagcttgtgcttgagaaaacgagtaggtgacttcaacccacacgacgcaccagcagcaatgacggcaagcagcgcatggcgaccgctccggcatgagttttgtcgcttgccagctgtgcgctcgcgggcgctttatgtattccggcgttcaccctaccgcaattatttttatgagtaaaggcttgtcgattctgcgctctacgacactcctcgttattttgggtgggtctcataacgaaccgccctatttcagtgtgtgagagagagtgctccgtgtcaagctgatcaagcgtgtcatttcactcatgataaaaagatgaataatgtcgcaatattcgtccaaaagtaatgtcccttgagatgcaagagttccttgtctgtctcaatccatcagcatgcaacaggcacattttttgtcctctgctgttgcacgcggaaagatctgccggcctgcctgcccagcagcacctctcagctttcaacgcaactcagagagtctcggctcagcatatcaactctacgactgcacattattacatctttattcctacttttacttccgtcgaggccgataactgggctcaacatagggtgacgattgctggctgtcgttgaacacacgatgatgccctttgtgctctagggtccagatgaaacggcaagttttttgcatcagagtggttcagggagacctggatgctgtcgttccgcatctcttgctttttcctcaatcgtgcgctaagtcatcacgcatctcgtcatgcctttctgtcgaaatggtaggctgatagctgaaggaaagcagatgagggctctgcacagcgggtgtcccccccgcaggcggtgcaagcgggtagctaaacgtatcggatgcttgctaactggacctgtgcgagcgatgcaggtggtgacacgcccttgagaagagccgatcagggtcgattggcggagcaggacagaaaataagcgagcgcgctcgagataaactgcccaacaattgaaggggtaaaatgggcggcattggattggcgagagtgtgtggtttggaacagccgagtgtagcggatcaaatacttctcgaagagggccggcgagaatgatgcgtgctgtgggaagtgcgatggcgtcacgaaggttgacggcggcggttgtggctgcgacagtgctacaggagggagccggtcctcagaactgacggagacaaaggcacttaggaaagatttcccagacggcaggaacaaggtgccatcaagcggagggtcagctaccggtgcgtttcccttttccctctgtttcgccttagttccattttcgcttactctgccgcttgttacctctcctcgccgcagcatgctcaatttcctgacgtcaagcgcagtatccgggatggtttcgaaggccattcgcagacggcgaccgacatgcccgaagctttcaatcagtcgcagacgagcgtcgtcctcctgcccaatattgctacttacaaggcctggcacgaccagaacaagcacgacgccgcgttccgctagggcgtcaaggcggcgacccacccgcttgctggcaggcaaaaatcatatcgcaagaactcaggtagccgtcctggtcgttcagcagtggctttgacgctgggcaaccggcacacgctcgtgttcgagatcgttagcgacttactccaattgacgctcgtaggcgctattcgtacgcatgctaaatctttccccagccttgcgtcggatgggcagattgacgctcgcttgtgccttcttgacgcagtgtagatgcctaccaagaacgccaacgtcgcgtacctgacctctggaggtcttttgttcattatcttagacttcgtggtcctttcgatgtccgcgtcggccccaagttcgttcgaacgcagtcagcgctaatgccgccgcctgtgcgctgatccacgtagattggcgagatcccagcaaccgattaaggtcgcccgctttagatgagcaccgcgtgctcgacttttaccatccggccgcccagtcgatcgctcaaatagcgaatgatgcgcctcctatacgccgtccagacgctcgttgtctcgattatcatatacttcctgatgggcgttaccttgggcgtacggtgctttgtgcgtgtacattgtctttttacttgcctgtctccaaaactaaagctacccacccttttgctatcagtccgcattttgattcattctcttcacatcatatatgacttcgcgattgaatcctatcctgacccttctcgcttcatcgctggactaactaaactcgcgataatgtaggatcctgaccgcccagcatgagcgccgccatacgatatgttggatactcgctcggcacgacgctctcggtcgccggctttatcgttcccgcccctcacatgcgtgcgtccctgttactaccggtcctctctacgagacaagccacttactaaagactttccttgtgtcacggtcggccgggtccatcctttgtctttggctcgcctctccaaaggagcataagacgggcgtttggagtcagaggcactatagacgagggaaacaaactaggcgaggagaagttcaagtggccacagaagggacagtccgccgtcatgacaagctgcctagcaccaggtgttagagagccgagcaaaggccaggggcagccaagaaagggccgatctgcacgagtccgcgaaagcctcgtcgcctcgggtgagacggggaggaggaagggaaagtgaaggtggatccactcagtggtccgtcgacgagtgccggaggagtaagaaagtggaagggaaggagctggccgtcaggccaaagagggggtgggggagggtgttcaacgggtcgggtcgggttgcctggtgtagggttactgcagcatcgaatagtgtaaggcacggtcaaggagaggcgggacggggacagagacgaacgaggtagggtcgggttggctgcctaggggtagagtggacagagaagggggtcgtcgagaggaggaaaagagaggcggagggaagagctacggaagaggaaagcgggcatgcggaagcggagggtgaaggaagacggagcggaacagatgcgaaagagagaggagccaatgggagagaagaaagatgaaacgagcggcgggcgagcgcaagaggctagaccgactgagcaaccagcatcctgaaccagacagaggccaaggccggacgatcagagtcgaccgagccgggcccgagcacggacgaggatgagagacaggacccgagtgaggtgcgagaaggacgacggggcgaggacatcccgccaagcgtgaagcagcttgagggtgccggactcgaccgcgccgccggacgagaggacgaagggacggaagggagcggagacccggtcggcgtacttgagggtcttgctccgagcggccagggcgagggtgtcgtcgacggcgttccgggaccggagggcgaacgagagcgagaggtccgagtgagcacgggcagagaccgaccgagcgtcctgcgaggcgagcgagacgacggtgatgtcgatctcgcgggcaccgtcgggaccggtgatgcgaaggtcggttcgaagctgagtgccggggacgagaggctcgagaacaacacgaaacttggcgttcgaggagagggtgttgttcatgagccgcttgacctgctcgtgtcgaccaagagcgaccggagcacgaccagagcaggcctcgtcgtgaccgaacggagcagcgtcgccacagtcggcgcagaagtcgagcgagccggggcagagcgtccggaagtgaagaccagaggcgacctcggcgtccgacagctcgagtaccgaccggaaggggacgacaccgagccaacgccgaccgaggaccgtgccggactcggagacagtgtcgcgctcgagaccagggagccgacggaggatgcgctcgagccgagtgttgaaggccttgtcgcaccgggcccgctgggtgacgatggccttgtcgtcgtcgacctcgagcagaagggctggagcgagcgcccggtcggccgcctccgagccggatgcgaaggcaagcggagcacactcggcgtgcgagaggacccctaggccaccgagacgagcaggcagggtgacgaggtcagcgtcggtgtcgagacgtcggggtgaggaccgaaggaggagagctgcgtcgacgagggccgcatcgaggtcgtcccagacaccgggcagatcgtccgtccgaagcgtgcgctggaggtgccgaagatcctgctggatgcagaaccgaagcagcagcaacgcatgctgagacttgaggtcgccgagtgaccgaagcagcttgacttgatggtcgaccttggcctggaggaaggaccgcctgaatgatggaccgccgacggccgtaccgagcagctcgagcccagagctgcgaatgtcggccagcgagtgtgacttggacttggcgacgttgagttgaagggacgagccgcgaccgtcgaagaagtcctgaacctcggccaaggcttggtcgtccggcgagaggacatagatgtcgtccaagtaggccagtagcagtcggtccgggccaaggtgtcgaacgaggtcgtccagcgtccggcgaacggcgaccgagaagaagagcgggccgaacgggtcgccttgtcggaccccttgcgatgactccagtacgtcgaccgccccatcggcaccggtgacggcgagctgagagggtgagccgtagatccagcgaccggcacggtaaagagccggagcaaagtcacggagccctgcggcaaggtcgcgacggtcgacggcgttaaaggcgttggtgaagtcgagcgagacgaggtgggtgtaggtcttgggcaagtcatctgcaagcgcccgttcgaccgctcggaccaccggctcgacgccgcccttggacccgacaccgagctggaccgggagaagcatatccggcttgaagtagtgtcgaagcaagaccttggccaccagccggaacggaagctcgccgacagcgatcggccggatgccgccatccgacttaaatagaggcgtcaaccgagaggcgtacaggagttggtggccgggtgcggcgccttgagcgacgagaccggccaataccgacacgaacgtgacgacggctggacgacggagcgacaccgacaagagaggctgtgtccagccggagacgccaggcgctgtgtccattttgaacttgcggaagacctcgtcgacgatgtctgccttgggcgccatgccaggagacgggccgatgcctgcagcaaaggggcgagcgagtccgacagggtgcttgcgcttgagctcgactgagacgtccgaggtgagaggagcgaccttggccgaaccagacagcagacgagcggcccgggagagacgaccggaagtgacctgcttggcaacggcctcggagatggtgacgggagaacggacgccccggtcggcgttggacggcatctcgggccaggcgacggaagggaaggctgccaaccgctgcttgaggtcgacgtcggcccgaaggccagggacgaggccgaccttgggcagacagaggaagtcgaacagcgtttcttccgatggcttggcgacgaaggccaaggcgagtcggtcggcggcgtcggcaaagaggcgagcttgtgagccgatgagaggtttgacggccgtcggcagcttgacgagcgacatgaaccggtcgagaaggtcgtccacaggggccgaagagtcgtcttcggagggctcgaaggtcggaggacaggccgaggtcggaggagcaggagcaaggaccggagcagggtcgccgcgctcggactcggaccacgagctgaaggaccagtcggccggcgtcggaggagcggaagaccgacgaggccgatggaccggcgtgagctcgtcctcggacaacagcagctcgaactctgaagtggcggctgcagcgttggagacagacgaccgacggactggcgttgacggagctcggggcggagctggagttcgggacagagctggggcggacgtgacggtgacgaccgaggcgaccgatggagctcgacggggcacgggacgggccggagcggaggtgctggcgtgtcgttgatgaagaccgacgcaccggaccttgccctggtgtgacttgaggccgtggtctgaccgagcgacggcgccgcaagggcaggcgagaagggtcgttcccctgaggtcggcggaggaccagctgatgtccttgtgccgcttgaccagatggtcccagaggtcggcgtactcgacgcgacagcgagggcaccggccacgggtgctggccatggctggcgaggcttggccgacgggtccgaccgtacccctgtggcgaacgagctccgaacccgaagagggctagggtcgggtcgggttgcctggtgtagggttactgcagcatcgaatagtgtaaggcagggtcaaggagaggcgggacgggcacagagacgaacggggaagggttgggtcggctgcttagggggcgcccgagctcgccatcctccagcacgagtcgggcgtgatgaaggtcgccaaccacttttttgaaaacggcatcgccttcttcaccaaaattgtcaacctctcgatctcgctcgtctgcgccaacggtgatggtgcgtctagcgtctgcgggaccggctttgactggcgactctctgactgaccacctacccgttcacttatcctcttagtcgcaccctttgtcggccacaatgcctttatccgctggagcgccctccaggagattgcgaccgaggaggccgacggccgcaagcagatctggtccgagtgccatgtctcggaggactttgactgtgcgctccgtctgctcaatcttggctacacgatccgctgggcgacctactcgaaccaggccttcgaggagggcgtctcgctttcggccgaggacgagatcaaccgctggcagaagtacgcctacggctgctcggagctcgtcttcaacccgtgagcccttcgccctgccttcatctctcttttctaaccgctgaccagtcgatctgtttgcagcttccgctactggttcacgcgcggccctttgaaaaaggacttcatgcgattcctcttccggagcaagctcccgatccactacaagttttcgtcgacggcctacatcttctcctactacgccatcgcctgcgccgtgccgctcacgatcctcaactacgtcatgctcggcgtcttggacctccagacgctgtcggcctacctaccttcgtggcagatccaagtctcgctcttggtcgtcttcggcctcgccgccccgttcgcgctcgccatcctgcgctaccggtccggccaggctggtctcatgcacgctctcctgacgcaggtacgtcgcaggtttcccgcaatgcagctgttgacgagacgctgacctcgcggcgtcgcacccgaatcagttcacgtggacgccattcttcctcgtctttttcggcggcctctcctatcacatctcgctcgcgctcatctcgcacctcgtcagcttcaacatggtgcgtcactctcgccgacccgtcgctttcgccgtctacctcagtgactgatctgccgctccctcgatctttagagctggtcggcgaccgaaaaggacgtcaagaactcgaccgtccaggaggagcttccccgcatcctccggcgcttctggccgatgctcatagtcatgttttcgctcatcgccggcgccgccgttgcgtcgaccggtctcatcccgttcgagtggcggatcgagagccccttcatcatcgcgccgctcctgaccacggccgtctcccacatcctctttgtctttgtcctgaaccgtgagtcgctcttcgagaactccgctcgatcccgaactgtatgctgacctttctctcctcctcagcggacgtcgctcgcatgcgcttctagcttgcccgtttcctgaccaattttagatatctgcccgcctgtcgcaccctcatactccttgttgtcctgcacccgtaatctgcttcaccttccaattgctgtgtctccccctcttcctgaaccatctgatctgtctttcaagcgattgacgctgtcgctttgagcacatcgaacgggctgcaaagagaggatcagtgagtgcggtcggcccgcgcgtgcacgaacgcagtcgtgcacggtcaggcagcgagagtgacctcgttctgccctccaccatcgaccaccatctcgcccaggacccaccccgcatggtcacgctcaagacctacctgctctcgcttggcccgccaacgcctgagctcgtcaagtttctcgtcaccgtcctcatcggctgctgggcgtggggcttcatgtttggcaggcgccgctggtcggccaagggcaaggtccgtgcctgctcttcctcgccctgtgctacggccaacgctagggtccagctctgctagaaccgggagctgaccctctcctctctacgtctcgctagcactgcatcgtgaccggtgcggctctcatttgcctcgcctggcagctgctgcccgagctcgacgcgtcggcactgctgacgtcgcccttccccgcctattctcgctctcgtcctcctgcctgcaggaggctcacaggggctcggtctggcgctcgccgagctgctgctcgagaagggcgcgcacgtcaccatcgtcgcgcggaccgagtcaaagctggcggcggccgttaagacgctcaaggtcggtgcttcccagcccggttacaaccttgcaacgcgctgacaccgacactttgctctctccttcaggccggcgccgaggacaagtcgctcgaggtcaactacgtcgcggccgatttgtcgtcctcggcgggtgcctgggcagctatcgacgaggctatcggccgcaagccgttcaacggcgcaatggcggcagccgtcttcatgtgtgccggcgtgcgtcgtcccccgcatgttcccaacccagtcgcctgctgaccatgcgcgccctccacctctaggtctcgatgccgggtaattttttgacccagcccgacgccgactttaccggcacgatggaccaagtgtactttacgtcgctctggacagcgcgagcggccacgcgccggctcctgctctcgccgccgacgcccgccacgtcgtcccccgcgccgaagctcgtgttcactgcctcgatcctctcgttcatgtctttcgccggctactcgtcgtatgcgccggccaagtatgctctgcgcggcctggccgactcgctccggaacgagctccagtggctcggcgtcgacgtccacacattcttccccaccggcatcaagtcgcccggttttgaggtcgaggaagcccgcaagcccgaggtctgcaagatggtcgaaggctcggacctgccaatcacgccgatgcagtgcgctcagcacctgctcgcaggtgcgtccctgcactcggctcgcctcaggccagctcgatcgtgcggatgcatcagctgatgccttctgatcgtgctctgccccctcgtcaggcgtcgagaagggccgcttcaacatcacctacgacctggcggcctcgatctttcgcgcatcgtcacgaggtctcgcgccctacaacaacgtcccttatgacctcctgctcgcgttcatcggctcggtgcgtcatcctcttctcctctgtcgtgttgtcgctgcgactgactgctggcgtccgttgccgtcgctgccctgtagtttggcatccccgtctggcgcaggtgggccgatgcccaggtccggagccgcaaggcgacgctcgagaaggagtgccgggccggccttttggcgctcggcctcgcgccggcgaatgcgacagaggcgtcgtagcagatcggatgcctgtacccctatcaggatgggcgatggtggaggcgacggcgtaggagggagagatcgggcgctggtcagctgttgatctccccgcccagtcgtcggcctcagattggggcaacgtccctgtcaaaacctggctaagtctaaggcttaatctgagagtagcagacagcatccatagcggcggcctagtgcaccgacggcatgcgtacttgcgcgctcgaatgacgcccgtttcgccaggccgcctcccagcagccaacgacgtccacggcagctcttcggcctcgacgtgaagcttcagcgcccttctcgcactcgccgcgactcatgagctcgatggccgctgtctctgctcccgggctggtcgtctttccagcgacggaggacgacgaggagcttacggcttggctcaacggcgagacgcctcgcctccgcgatggcgccttcaggtccatccatcagctcctcccagctggaccccccggctgactcgccgctgtgtgttttttcgcttaaggcagcagggcgtcgagtcgctctcagcagctgactggaaccgcgtcggtcggctctggaccgagctcgccgcccgctcggcagcaggcgacgaggacgtcgacctgctccagctcgtcgacagcctcgcccgctggagccgcaatgtctccgtcgagccttccggccggtcagccctgctccctgctgccgttcccgcactcaagtcgctcctcgccggccggctgacagctttccaggcgctcgaggacgcgacaattcggccggccgtgcgctcgctcgcccagctcctcgcaaaccttgccggctcgagcgagagcgctgcggtcctcctgccggggctcgtcggtgccacgccgttcgacaagaacgtcgtcgtccggctgctcgcgagcgaggacggcccgacgctcgaagcgaccgtcacgtttctcttcatcgcgctcagcgaggcatccaagcggtcggacgtctttctcgccggtccggggctgagcatcgtcgagctcctcctgcgccggatggagcgctggttcgaagccgagggaggctctgaagaacgttgttttgaactcggctacgagctcgtcaagcttctgttcgaggcctcccacacgtcgaagctctacgactcgctcgccgacggcattgctggccagccgatttcgctcccgcagtcgctcctcctcaagctgttcgacgcctatctccacagcggcgcttcgaacggaagccttggctcggcggtccttggctcggccgggctggcgttcctcctcccgacgacggaacggctgctcgaggctcttcttcggccgatgcgcgttttgcgaccggccccagcggcagagggcgacaagccggcgacaccaaagaagacgccatttgaggacgcggcgttcggaaagtgtgccgagggcttttcgcttggcctcaaggcggtcctccaggtcgcgctcttcggcgccgagcaggtcgatgaggacgaggacgacgagacgcggctcgacggcgcataccggaaaaaggctggccaaaggctgatggacgagctcctcgcgggtgccttcctcgacgcggtgctcggtcagtctcttcctcttatagcgctccccgcatgtcctgcgactgaccatccatcatcccgcggctcggacgcagagctcctcacgctctcggacgtctacgagccccgactcgtgcgcacaacgacatcagcgccagtctcagaggccagcgccaacggctccgcttcccagccgacagcgccgccggcgacgacgacgcacgcgttcgcccccgtccgaaaggacgttgctcgcctcctcgggatcgtcgccgcctcatcagcggctgcgcaggcgagcgtcgccgacaagggcgcgatcgaggtcctgctcgggatgtgtgcgctcgacgtccagaacccttgtccgtcctctctcctcctgccctcatgcccctctcgcacaacgtcgaacgctgactgcttcgtgtgggccgcttcgctgcagtcctccgcgagcatgccctctttgccgtccgctcgctcctcctccacagcccggtcaaccaggctcgcgtccgtgaactcgagcctcaggcaacgattgacgacgaggggaacgtcgggcccgtgccggaccggtggcgcaactgaggaagggcgggcccggggtgcgtgaggcatcgagggcggtcacggtcgtcgagcgtgacctgaccctctgtcgagcgctaaccgagccgccgatgagcgggagacgcccgcccagctgatcccttcccaacgctcggcattctccctttaactcgtccgacgtcgcacggccaaatagcacgccgacctccctctacaggacaagcgacaacgcacccgaccgccccttcgccgccttccacaaagccagggctcaatcgccactcccctccctaccgcctcgcaaccccaatggagcgaaggaaacgcattcaaatccagcggccaccaacgtccaacctgcccccactcagcgcacggacgagcgtccggtctgctccgctcgcgaagggcgagaggccgagccgtgcgagctcgagggccgaaaggagccgttcgggcgcggtgggggagctttgcgagctcgaaaaggagggataggagggaggggggaggagcgaggcgaggtgggacgatagatggcggtgcgagtggaggatgagcgtgaggatcgcctgggctggctggagcgaggccggtaggtcgacgtccgactcgtcttcattggccgacatgccgccgccggcgtcgtcgccgtcgtcctgcgaaagagggaggtacaccccgccgtctgcgcccgcgcccgaccggccgagcaagagcgagagacaccagtcgcaaccggcgacgagggcggcgagccatgcggccgcgcttgcgttcgcgctcgggtccttcgggagcggccaggaggaggccgagccgcggggggagggctcctgatggcttgaggcgccggcggacgcaagcgcagcaaggagcgggccgtcccaccacgtcggccccaacgcgcttgtcgttgtcttcatcatcctctggctttgtccgctcgccctcggctggccgggcccgtcagccaatgatgcaggcgtgtggatcgagaacgtcaacctgcccttggacggcgcgtgctcgccggcggcgggggtggaggagggagagctcgagccgcggccgtcgggctcaagctcgaggaggacgtcgtagagctctggccgttcgcggaagagcgccttcgagggcgggcgcaacacagaagaagggtggtgggggaggtctccagacgacctgcacgccgtcaggcacgctcctcctccgctcttggctcgttcggccgctgctctcactcgccggcatccgcgcacggcacgacgcggtcgagtgtctcgccaagcctggcaatgcaagcaccgtcgccgggcttcgtggcgggctgagaggcatcaagaacctctgccggatccttggcaaccggatccacaagggcatcgctgagtcgcgcgactggcgggcgctgctcgaggttcgttctcgataagggcgaaccggccgcctgctgccgctgacgatgggagactacagttctgctttaagatggcgcaggtccgcaacggtatggaagaactcgtcggcatcgagcgtgacggcctcatccacaatgtacgcctttgacagcgcttgcttttcccgccctcctttttgactctcccgatcaaccacccaaagctcgcgctcaagatcgacaccaaccttctcgtcgaggccggtcagaggatcaatgagacggtcggtcccgttcgtgccgtgaagatcgtgcggtcgagctgacctgcgatttggccgcagattgactgggacgagtcgagtgcgcaaaatcgtgtctgctgcaaggccggggtcgacgcgacgctggacgagatgaagcagacttacgccgggctcgactcgctgctcgtaagtgcccttgcaggtccctcgttcgagcgtgaaaggcagactgacacttttcaactttcgacagatgaacgtggccgaccgtctcgcgccctcgctcccggccgaggtcgtcaaaggtctcaacgtcacgttcttcccgcagctcggcttcctgcttgcggtggagcttgtccgtccgtgggacgagtacgacggcaacgtcctggagggttgcgacgttcaggtgcacttgcgttccatagggcattatctattctgaagggccccccctctgaccgcaattttactctactctcgatccctcgaacagttttatacggacgaggtcacctactgcaagagcgctcaggtaggactagtcgcaaagcccctttcacggtgcttggtctgacgtctgctctgattggcagatgcgcgacctcgatgcacactgtctgtatatccgagcctctgctgctaatcgacacaagctgacgccatgtcggtcccgcacagtcggcgacattcactctgccatggtcgaccgcgagagtgcgttctgacaatcttcaaagcttgcccttgcatgacgagcttgatcttgccctccgcagttgagatcatctacaagctgtcggaggtcgtcctgcagcgcgagtcggacctgctcgtgacggttgaggcctgcgctgagctcgactggtgcgcttgggtcggcaagtcgcgcatcaccgctcctttgctgactcccgtcttctttgcctcacgcagcctcatcgcctttgcgggcgcagccgtcgactggcgctggacgagaccgcagatgacggacgagaatgtcgtccgcatcgtcaaggcccggttcgtccgcgtctttcggcctcagtcaggacgcaggctaatcttctcgggttgcgcaggcaccccttgctggtgagtgagcatgctcactgccgagggctgctcgcgtcctgaccgacgatgcgactcgcacaggaggtcgtcctcgactcgtttgtcccgaattcggccctgctctatggcggtcacggcatccaggttgccgaccaagacgatgccaacgttgatgccgaaggaggcaaaatgactggcatcaagagcgacacgccggatgacggacgccagacgagcgtcatggttctaactggcagcaacgcctcgggcaagtcggtctatggcaaaacggtcgctctgctcacttacatgtgcgtcgagtccgatcggtgcccatcgagtagcccagattgacgccttcctatgctccttggccgcagggcgcacatcggctggtgcgcgcacctgttgccaagcttgccgtttgcgtcagactgacattcgaccggaccttcaaagcttcgtcccggcggacgccgcgaccatcggcctgacagacaagagtgcgtctctgccaaagctgcgttggacccaggcggaccttgacgcgcgggcctactctgcagtcttcacgcgcttgacggccaaggagagcgtctcgaagctccagtcgtctttcacaatcgacctcaatcagatcagccaggcgctccggaactgtaccgctcggagtctgctcatcatcgacgagtttgtcttctcttgctctctagcaagcgtgcgatcgggctgcccggctaaccagatgcgtgtcaggtttgggaagggaacgatctcgtctgatggcgccggtctcctcgccggcacgatcctccatctgctcaaccgcggcaaagagtgtccaaaggcgatcgtcatgacccacttccagtgcgttcgggccccctacatcgccaagctgacgacgcactgacctccccgacgtgtgctcacccctgcagcgagctcttctcgaactcgctcctcccgcccaacgtgccaatcgactttgcgtccatggtcagcagctttggctgctgtgtcgctcgccagagagcgatgctcaccctgcccttgttgtctcgcaggaggtcgttatcgacgaggccgtcgccgacgggcagtctcagggcaaccccgttacctacctctaccgcctggcgcctacgctcagcctagagtcacacgcagccgcctgcgcaaagagccagggcatctcgaacgagatcatcaagcgcagcgaggaggtcaggtgggttcatctctctcctttctcccccttcttctggcgtccccggtcacctgacagtcgagcgcaggacacacctcatccatttcgagtatctgccgctccaggaccgcaagctttcggacgacgagttccagtacgtgatccttgtctgtcgttacgtcttcccggcgagaacggagtctgaccactcttactcgccactcgacaggcaactgcagcacgccgagcgggccgtccgtgcattcctcgcccgcgactactcgacgtcgagctttggctcgcgctcgaaccacgacatcaaggcagagctgcgggcgatgctggagttgacaactgaggatgacgacgatgagcgcgagtgagggctcgcagcgtggggctcgacgaacgacatgcatccgacccaggcgtcgtcgtgcacgacggcagccgatcaaccgagcaccttgctgaccatgtttttgacgagcgatctcgcgtaggggacgtaagacaaagagtaccactgcgacacaggtgagaagcggcagtcagcgacggatacaacttgtggcgtcgatcgtcagaaaccgacgtacgaggaacgccacgtaggaaatgcttgtgcgagaaagaccgacaggatgagcgtcagccaagcagacggcgttttacagggcacacacgttgaggcgacgcacacgacaaagatgatgcacagcacggcgttgccgaggacaaaggcgccgacaaagacgagcgcgatcgagccgaggctggcagtggcaggggttgaaaatagtcagttgcggatcgacccgaatctgagctggagtcggacgaacaagatgatgctcgcaaccaggcgaaccgggctgaacatctacgaggagaagcgggtgagccgactgctcgcgtccagctgcggaaggcgcgcgcggcacgtaccatcttggcctgcttcaggaagccgcagaggaagccggtgccagccaggctgaggagcgtgccgacggcgtagaggaaagcaaaggggatggtcgcgccgatgaagaggaggatggcggcaacgatagagatgacgagcccgccaccggtgcctgcacggagagggaacagcaagtgggcgcgcgtgtcagcacgttgtcaaagcggtcgcagactgatagctcgcgcgcgactcacaagcggcaaagctgaggtatcacatgcgggagagaaggcggtttcgagcacgtagatggtcaacgactgcaggaggattcgacgcgtgtcgacgcgcgcgaggtctgaggcgacggacccgtagactggtggcgagcatcggcggaggcacgtcaggacaccgagcaagcataggagtcgaaagacagagcagaaacgacgcacttcgctgctgccaactcagctgcatgaactcgaacgcgctcttctccctagcagacgggtgacgggcgagacggccggtgcgcaggtcagccagtgctgccttcaagacaggggctctgaccaagccgccgagctcgagcgacgatgaagcaagggacgcacggggtgacattaaggtcaagaggacctccgcccgagcctcctgacccgaggcggcccgtgtcgagattcctggcgagcgattcgagcggcgggatcgtcagcatcaggcagagaggaggagcgaacaggccacagccgggcagaagtaacgctccctcgcctgtgggcaaagaactcacagccagccagacatctagggtgaaagtatgatgggtgcctgggcaagagaatgagagggcttcaggagaggtcgacgtcgggctggagcggacgggccaagcttgcgagctggttgacgcaacgccgcaaccgcgcgagcgagagtctgctattccagactgcggcgctcggcggccgtctgctcctccgcagaacgcatcgcgctgtctacgagagatcggaaggagcgagagaagcagaggggcgctgaacgttcgtgactaagaactgacttagttttgagggggaaatgaaggcgaagcgatggcctcgaggcgactgcgcgtgcgccaagaccagagcacacggccgagaaggacagagacgatgcaatggggggtcatgaagatctaaagtcgtaaagataagcgagagcatcggaagatgacgcctggggtcgcgcgaggcagttcagaaggggaccgtcttgccggtccagtcaaagaactggccggaggtctcaacggtaacctgcttctgcaggacgttgatgacgccgctcgcgctctcctcgaccgtgatgtcgccccaagggttcatatcggtcttgggcgcaccagggtggatcttcaagaaggagaaaggtggtgagctgagcgtcgagggtgttgggggaacggcactcacgagtccgaccgcccaaccgccgtcgcggggcttctcggccgagccgttctcaaactcaagcgcgagcttccggtaccacatgttggcagccgccttggaggccgagtagccgctggcaaagtgagcgtacgggccgaggctggtcatgccgccagccgagccgaggatcgacgagaggagcatgatcttggccggcgccttcttggggctcgactggaggagcgggacaaaggcgatcgtcgtgaggatggcaccgatgtagttggcctcgatatcctggcgcaggaagtcggacgtgtagtcgagcgcgccagtcttgccggccgaggcgacgccggcgacgagcaggaggttgtcgatcgacgaggcgttgtccttgacgaacgaaatttcgcgcgtcgccttgacggcggcctgcgaagagaaggcagcgtaaggggggcgtcaaatgagtcggcggggttgaagggaaggcccgaacgcacagcgatggactcttcgctgctgacgtcgagggtgaccgtcacgacgcggccctcgctctcggcgacaatcttctggagctgatcggacccggccgggttgcgggcagcagcgacgacgcggacctcggtgtcccgggcgagctggcggacagtctcgaggccgatgccgctgtaagagggaaaggacgagccgacaggggtttggggtcagtcggctgaaaaggagagctgcgcgcgacggacgaagccgaaggggcgacgacctaccgcgaggcgccggcaacgaagatgacggtagggctcatgttttcggggtggagggtagaggagggcaaaggacgggatcgactggtgatggtgacggcaagggaggaagtgggagagctaggccggagctcgcccttttagaggggtcggccctcggccgagctttgcagaccgagttcgatcgccagcagcaccccgcatggtgaccggcctctgccatcacctccgcagagagcacacgccaagctgggtgcgattggcgatgagcggcgacgcttcgggagatgctggccgcgcgagcgaccggggtttcggcgacgcccttaggtagacggccggcgcgggctagcgacggcccgtcggcagtcccggccgaggagcccagacggctgtgaaagaggtgctcggtgcggggtcaaggtggggtcagacgaggcaccaagtggggcaggcaggtaagctctggctcggccgtcgaagaaaggccgggggcgcgggtgatggtcgagagaagacgggcggcgggacgagtcgaggcggccgggtcgccggctgcgcgaggcggcgttgcccaagcaccatcgtactgtcagtcctgctcgcactctcaaaggcaagctggcagactcaaatcgcgcgaccgcatcggggcaggtagctgagggcagattcatgtctaaggggcaaaatatgggtcaagggggaggggggggggggcagacgacggccggagccctccacctccccccttccccctctctcggtaccgattcaatcggccgactgcgtgcgaccgacgatcgtctgccgcgtgtgaaggagagcgcacgacgccgctcgtcgagagtggagggccgggctccggggaagttgcgggccgggcctcggagcgataggtcgtcgtcggtcctgtccttgcgccgcagcgctgagccaactgacgtcacctgccgagcgtcgcagggttttgcagagggtcaggcaagagcatcgtgatttttcgcaagcggggcgactggcgggcctgcaccgagtcgggtgggtagaagtacagagggagagaggaggggagtcatgaaggacccaagcccagggagggagaacgcaacggctagcgtcacgtcggccacccgagtgagagcgggaccgacgcaggagtgatgaggaaacgagaggcggacgtcccggtgccagaccgggggcgtgtcgcgttcgagaagaggggagcgcgggcgtgagaggggaagaaagaaaaggagatgagggcagaaagggggacgggcaggagcgccggcgatagggctggtccgatatctagaagagcggcgtgtgggttgtgcgaggcggacagatgggtatttggagggtccgagactcgtttatgcgtgcgtgctagcgtcgttccggcgtgcgtgctagcgtcgttccgaggagcgccggtcgctctcgccctctagagccccgggaccctcaagcctccttcggccctaacgtcccgcaactcgccccccgtgctcctccttcgctcgacgcgcgcactcgcactcgcgagccggagccggagcgcgagcgcccgctcctcgcgctcgttgggcggaggcgtgagcttgaaggtcgggatctcttggatgaccatccggggcgggcggacggcgctgccgacgcggagcggttcagaaaaggcggcgggggatgagctcggtcggccgggaacgatgttgcgtgctgctgctccggcggcgggctgggtgcgcgcacggttgaggaggaacgtcgggagccgcgaggggagcgtctcggcccggacgggcgctgcgaccgccagcgtgggcaggcgggtcacgctcgaccgggaaggcggcgaggagacgggcggctcagagttgcgtcgtgccggcgtgccggcgaccgtcgtcttgcgcaggcgctgggtgatctgctcgagcgtagggggcgaggaagtccgtctgatcgagagcccagcaaccggaagctgggccggcgcgacggctgtcggacggaagtcggcagcggcggggacgggcgagagcggccggggcgagctcgtcagagctgatgcgaagaaggcggccgggcactcggtcgtcgagggcaggtcgtcctcgtcctcgtctgagtaggggggcgtctcggcccggagaggctggcaggcgatgtagcgtgttggcgtctgaaacagcgaggtgagcgagcgggcgagtggggacaggcgagtaagcgacatgcgacagtgaagtgaaggcaaagcaccgagcgaacgcacctggacattgagcgcaaagacgctcggcgactcgggcggcgacggcgggaggatcatccctgcgagcgggacgggcccgggcccttcgcgggcgccgtggatgccggtcgtcgactggcggaggagggccaggtgcttgcccgcttggcggcgggcgacgggcaggcggggtggcgtgacgagagctagatgagagggatgacaagggcaaagttagtctcgggtaaaggacgggaagaaggaggaggcttgcgtcgccctttccggaacaacagggcgggcgagagcgcgactgaaagatgggacgcacgacacgccatcatccggccaaattcgttgacggggagtgcctcctcgtcgacgaccgagagcgtctttgtatggcttgcgacggtcgagcggcgggtaggcgcgtgtggggcgagggagcgagcgagcgaggagggcgagggtcgtgggctagacagagtctcgataggacggcgaatgacgtcggtaagcttgagcacgagtgaaggctgggctgggctgggctggagggcggtttcgagcgaagacttgagggcttgcttgggcgggcggaggaggatgctttgatgggccgaggcgagaggcgtcgcgcggcgggtgtggcgagcgaggaaaagggaaagagacgggaaaggcgaccggcgcgaagagggagcgagcgagagagagagaaagagaatgaagcaggcgagaagagagcggagacgagagaaggggcagaggagagagcagtagtggggagggaagagaggaggcgagcgagcgcgcgagaaagaggtgctagagccgcgcgtccgaaacgcctcagcgcgtgcacgcgcgcgcacggtcagaccgtgtgagacggccgtctctgctgcaggtctcgcggctctgcactcagcattcgtccgcacccggcgctcgcacggttagagagaccgtacagaccttgagatgagctgctccgcaatgagttgctgccggcgctgctgtgagagctgcgactcttcaattaaaatccagagagcgatggctgcagcgcggtcacagagctaggctgcgatcttccttcctcagccgatccttcgcccaactctcgtcccctgacgccatcctgcagcctctagcatcgacagaggagcagagtagtgcgaggcgtgagatggtggactcaaaggggtcaaggcgatgcagatcaccaggtccttctttttgagttttgcatcggattacggccctcgtaattagaggggtcgtaactcgcgtgcgcgctccgcgccggtcgaccggagagcggccgcctgcgataggttcgatggggctgctcatcgccgctcgctcctttcaccaccaccccccgaacttcctgcctcgacagacgcacccaccatgcttcgtcgcagcacacgaccggcgagcgcgctctgtcggtcctctctcgtcgcgcttgacgcagccgatcggctggcttcgctcgtctttcaacgctgacgcccttcgtcctctcctctctccgccgctctgcctcctgctccttgctcctccttctctaggccgcgccgccccctcctcgctcgcctcaacctcgcgcctcccggccattagccaggcccgctcgctcgcgaccgcgaccgaggccccgcccgtccggcactacggcgggctcaaggaccaggaccgcatctttacaaatgctttcaaccggcacgactttggcatcaagggcgccatggtccgtcctccctccctccccgccccttccgggcctgatcgaggccgatcggcagcgtcctcgagccccctctggccatggtgcaccttgctgatgctgtcttgccttccccgatcgacttccgtccgtcccgccaggcccgcggcgactggcacaagaccaaggagatcctcctcaagggtgactcgtggatcattgacgaggtcaagaagtctggcctccgcggccggggcggcgccggctttccctcgggcctcaagtggagcttcatgaacaagcctggatgggagaaggacaagcggtgcgtcgctaggagaggttgcggagcgggcgacctcgagactgacgcttggtccctccgatcgtcatagcccgcgctacctcgtcgtcaacgccgacgagggtgagcctggaacctgcaaggaccgggagatcatgcgcggcgacccgcacaagctcgttgagggctgcctcgttgccggccgggccatgaacgctactgccggtgcgttccctctcgttcgctcgaccgctgctcggcagcagcagcagctgacaccctcgcccccccccccccggccagcctatatctacatccgcggagagttctatgacgaggcctcgcacgtccagcaggcgatcaacgaggcctacgctgccggcttccttggcaaggacgcctgcggcagtggctacgcctttgacgtctacctccatcggggcgcgggcgcctacatttgtggcgaggagacggcgctgatcgagtcgatcgagggtaagcagggcaagccccggctcaagccgccgttcccggccgacgtcgggctctttggatgcccgtcgaccgtcgctaacgtagagacggtcgcggttgcgccgacgattgcgcgccgtggcggcgactggttcgctggctttggccgcgagcgcaaccaggggaccaagctgttttgcatctcgggccacgtcaacaacccttgtgtcgtcgaggaggagatgagcatgccgcttcaggagctcatcgacaagcactgcggaggcgtcatcggcggctgggacaacctcctggggtgcgttctcctccttcctctctttcggctctattcttttctcaacggctgacattgtgctcctcgctcagcatcatccccggcggttgctccgtcccgatcatgcccaagcacgactgcgagacggcactgtgcgtggcctctcacttctggttgcgctcggccgctctttcagctgacccttccctcgcccgccgttacaggatggactacgactcgctcaaggacctcggctccggcctcggcacgggcgccgtcatcgtcatgaacaagcaggccgatgtcgttgccggcatctcgcgcttcgcgaagttctacaagcacgagtcgtgcggccagtgcacaccctgccgcgaaggcacgacctggatggcaaacatgatgtcgcgctttgtcgagggccgcggaaacgagcgcgagattgacatgctgctcgagttgacgaaacaggtcgagggccacacgtgcgtaccttcgtccgctgtcgcgctgggacgaatcgagctgaccctgactcccgcctggcagcatctgcgccctcggcgacgccgccgcctggccgattcagggcctgatgaagcacttccggcccgaggtcgaggcccgcatccgctcgtaccgcgagcgcaacggtcggtcctccttcgtccctcccgatcccgacctgggtgcagatcgggccttctggctgactttccgctctgtctcacctttcaggcgacgttttgttcggcggagcgcttgcttctggcatcgaccccagcaaggccatgagccctcatctcggctcgggcgactacctgatcggctccccgcgctcgtaaggcgaggagttcgagggcgggagatgggaaggagggtgtctgccgacaccgactaggagcgtgcgctgagcctcagtattctatcatgactcgaatctctttcttgagattggcggacagaggacctgcaggaggaggggtctcggcaacggaggtgccgccagggcgcgtccaccggtcgcctcacaccttctgccaaccatctcctttccttcgacacaaccactccatgaccgagtcaggtcgccgaccgccgccctagatggcctcggacctcctcgcccagacgacgacagagtcgctcggccatctgctccaggtcgtcgcctatgacctcgcccgtgcgtcgatcgagcccgagctcactcacacccatcgcccgcctagacgcccgagctcatcccgccatcgccatttcctgcagctcctggcggaacatacatcgatgagctcgacgaggctctgcaggcggcggccgatcggatcgagggctttggccagggtcaggacggcttccgacggggcgacatggttgagatacagggcccgggcggttctggtacgtgctgctgctctctcttgcccctctcgttcccttaggcgagccatccaacgctgacggccagcaccgtgcccgtctcgtcgttctgcaggcaagacggagctcctctactttctcgcgttgacccgggcgctcccttaccggccgacgctcaccccgcgctcaccctcgacgcagcggcccttcccgacgccggtcctcctcggcggccacggccagacggtcctcgtcttctcgaccgacgccggcggtttctcgctcgtccggctcgccagcctcctccgcgaatacgtcagcgggaagtatgcgcttgcggctgccgaccgctggggcgaggtctacacgtcggctcagcgcgcaggctggctcggcatcaggcacgaggtcgagatggtcgtccgcgatgcgcttggccgcatcaggctctgccggatcgatcggcccgacggctgggcactcgcaactgcactcggccggatcgaagacgtcgtcctgactgagcttggcgagaaggatgagctcgggcttgtgtgcgtcgacggctttggcgcggctttctggccagacgcctttgctgccaggaatactgtcgccggcgctactgcccccaccgcatcaaccgccaatgtccccggcggcacggctggccctgcgaaacgcctggcctctgccctcgctcaatcgccgatgtaccacgcgctcgacgcgctcacccacgtccggcagacattctcgcccctcgtcgttttaacgacgcagctcctgcccggcggcggcgtcgcaggccgaacgacgacgcacctcccttaccccttcacgcacccgttcccagcccctcggtcgtcgaccgccctcccgccagtctaccccaggccaaggcgagcgcagccgtcggccgttccgcgagaaccgaagcgacgaggagggtgagtgagatggcccagatggctcctcaggtctccgacaggacaccgagcgccttctcgagacgggtgacgacgttattactccgtgaacgactgatatatgttgcgaggagagagcaggaagctgcaagggaaaggcgaagagagagaaaagaaaaatgtccagcggagtctggacgcggccttggacggtcgccgggccccggccggcgccgacgcagcaatacttttagcaaagcggtcgacgacgggacctttaccgtcgacttgatagcttacagggtgcagtcgagcccgccggcggtcggcccgccgcccgctcctccgccaccgatgaccgttgcagaaaagtcggttgcgactcctgcctctgacccgccgccgcggacgaccgtcttcgacgcaccatcgccaccttcggccgcccacaattgccacgccgcgtgcacgagcaaagcggtcccagtcgcgcgctcttcaggtccgcgactttgacttggtctggagcgcataccccgacaacaacgttcccgagcacagcgtcaaccaaccgtcaagaagtggtaagggccgtcattcgagttgtcccagggcctcaagacgaagaccaccaagaagacaaatacaataatcaagcgggaggcgcccgtggccagcctgccccttgacacccgtggaccagtctacatagcttcacgcatctttgtaggacgaggcaggaggcagggccgactatagtgggggtgagctactgcctaggctaaaggggcgctagactagggggggcgaacgtacctcagtctcaggattactccgtgaacgactgaggtataggagggggaacgagcgggcgtctagctaagaggagggagcgaaaagagaacggaggaaagagtccggcggactctatggcgtggcgcccgggtggccgctgggcggtcaccaggcgctggcggcgcgcccaggttcccgcgctgcgcccagccggcgccggcgaagcaacaccttcaacacctccccgcgacctctgtatcatcgccgcccggcgaaacgcagcaggtcgccgtgtcgatggtgtgctggcgcagcaaggggtttcgtcagaccgtcgaccggcatctggtcggtcgatacgtaggtgattttgaagtggccgcgttcgacgcgctgttggatccagtgatagatgacctcgatgtgtttcgtgcgcgggcggtgcagcgggttacgcgtgagcgcgtttgccccttggttgtcgccgtaaggctcgagtacctcatcgtcctggctcgcgccacaaatcgggaccgggccgtccatcctgatgtcgagctctttgaagaggccttcgaaccatgacgcctccttgcctgtctctccgagcgccatgtactcggcctcagtgctggagcgagcgatggtggcctgcttgcgagactaccaggagaccgggccgccgccgagcgtagagacgtaacccgtgaccgagctccggttacccgcgtcgtttgcccagtcggcgtccgagaagcccttaagaccttgcctccctcgtacaccaacctcacagccgacgcaccccgtaagtaccgcagcactcccttcagggcggtcatgtgcgccgctccaggatgggcctggaagcgggagagatagttaacggcctgggtgatgtcgggccttgtcatgaccgacaggtagttgacggagcccaacagggactggtaagtcgtcacttcggccggcggaagccggtcgggcgaggcggcgtcgagggcgggcaagctggtcttggccgggagcggcaccttgtttggcttggactctgacatgccccatcgctcgagcagctccttgaccttgtgctcctggccgacctcgatccgccgccgggcccggtctcgctcgaccttcaagccgatcatgtgcgtgagcttgccgaggtccgtcatcttgtagaccgccgagagctgggctttgaagcgccgcagggcggcgaggttcgagaaggcgagcgtgaggtcgtccacatacacccccaccagcgctagcccgtccgccccgtttcggtggtagagtgagtggtcgaaggctgaccgcttgaacccgaacccctgcagagtcttgtccattgccgaccaccaggtgcgtcctgcctgcttcacgccgtagaggttgcccgtcaggcgggcgacgtcgtcttcttggccttagcctggcaccgcaaacccctttggctgagcgatgtagacctcctgttccatctgaccgtgcaggaaggcggccgtgacgtccatactgtgcagctcgaggtcccaggcggccgagagggcgagcaggacgcgctcgctcgtgcccttgacgaccgatgcgtaggtctcgccgtactcccaaagctgctgggggaatccttgggccaccagcctcgccttatatttgtcgactgacccgtccaagttgcgcttggccttgtaatcccacttcgacccgacgaccttggcgcctggcggacgctcggccagctcaaaggtgcgtgcttcctctagcgaccgcatctccttctccatcgcctccctccagcactctgcctggggcgaccttatggcctcagtgtaggtccgaggctcggtctccggcggcggaggtggcggcgacgggaacgacagggcaggcatcgacgtcgccgagtgagcggtctacggttgcatcagcctcgcaggtagtctgcgctctcgtgctgggttccagcgtgccggtgggcgtgtctggccgatgaggtcagccgtctgtatcaaagctgaagtcgtactcgtttgcgggattgcaggtcggccgattttggcgcggcgtttcgacctcgtcggcccttccgcccaaccatcaccctctcccgcagcgtccgatttcgccaggctctcgacctcactatcctcagcattcaccgtctcatcctccgagatgacaactggatggcccctctgagtgcccgcagacaccccttcgcccgcacgggcgtcaccccaggctccagggagcacccgggcagcgtcaaccacgccacccgtctccggccgtcgtgcgtcggtctccttgcctgtcgtctcgtccgcagactcgactgacggcagctctgcgacaccttgcgcatcagcaggctctaggacgagcagctcgccatcgtacggctccccaggcgcgtcgtggtccggtgcgtcgtccgtttcctctcggctcgtcggctcgcctgcggcctcgctcgggctgagaccgccactagactcgactgaccgctgctccactctcacagcaggctccaggacgatatcgtggtggcctccgttcggtgcgtcgtcttcttcgtcgccgcctcggccggccgcctcgttgtcgctcggctggccgtcctcggcggctcctgggcgatgtttccgggggagcttcgccacccccctacaactttgcccatcgccgcctgcgccggctggctccttcgcagcacatccagggtgctcgagactcgggcggagcctttgccgctctgcgggcgggccgaggtcgacgtcgatcgttggtcgagctgcgtccgcacgaggaccttcgctaacgctcaggtctccctctctcgcctccgcagcctgtccttctgcagcagctcgatcttgtccccctctcgacgtcggcatggcctcgtcgaacaccacgtcgcgtgctaggaggaccgtccgagccgtcggatcgtacaggcgccaggctcgtgcgtccgttgcgtatccgaggaggaggcaccgtcggctgacgtcgtccagcttcgtccgcttctccgacgggacccaggcataggccacgcatccgaacggccgtaggtggccgacggacggcgtctggccaaaccacttctcgtgaggcgacgtgcccccgagagctcgatgcggtaccctagccaagacgtacgtcgcgttcatcaccgcctcgccctataagctgttggacagggctgacgccttcagcatgcagcgtacggcttccatcagcgtctgatcgaattgctcggccacgccattcgactgcggcgagtacgggaccgtcaagcgtcgctggatgccggtctccttcaagtacgtctggaaggccgtgctcgtgtactcgccgccgttgttgtctgactgcagtgccttgaacgatcgtccagaatgcttctctgccgatgtccgaaacgccttcaacgcctcaaacgtctctgacttctcgcgtacgaggtacatccacgccttccggctgtagtcgtcgatgaaggtgacgatgtaccgcttccctgacctcgtctcaggcctgacaggcccaactacgtcgccgtgtacaagctcgagtgggtccttggacttgcggtcggagctcgggaagggcgaccggtgcagcttgccgagctgacacgccccgcagacacctccgcaggccgtcgtactcgtcaaccgcacgtcctttgcagcgcccgtcgccattttcctcacgacatctaagctgagatggttcagcctgcgatgccatgtctcgagaggcgcggcggcggccgcgaaggcaacgtgcaggggggccgggacggcctttgcgtcgaggaggatcgaggggcctcggtgcgaggccgtcataatggtgcgtccgtccttctcgatcgtcgcccggtcgctcgtcataacgcagcgtgccccttgtcgtcgagtcaagaccgagactgacacgatgttcgtcgtcacatctggcgtgaacagggctcgtggcagctgccgtcggctcgccttgccgtcgacggtcacgtcgagcaccagcgtttcgtgtccatgtgcgtagatcgaagaacctttatttgccgtcacgaggggctggggggttttgaagggcgtgtagtcccagagcatgctcttctgccgcacgagatgctccgatgcgcccgagtcgaggatgaaggcgctgacgtctgtagatgttcctgcttgataaacgtgcagacccatgtcatagtccacgccctcgtcgaatgtcaccgcgccggtcgcgagctgagccgtgccgtggccgccgtcctgacgggccgggggagcgggcgtcgcgcgcgtacgctcgtcgcagcgtccgaagtggcgcttgccggcgcacttccagcactgcttccaggtgaagccggccggggcgtcgcggcgcttctcgcgcctgcccgccgagccgcggccggggtcgttcgtggtctgccggtggacggccatggcggcgagctggcccttgaccgtcgtgacgcgcttctgccgctaggcttcggccaggtagcgattgacgaccacggtcggcgtgacttgggccggcgggaggttgtcgactgcgttggtcagggctttccaggcctcgtcgccgacgtgcttgatcgaaccctgcaggatggcgacgtgcaggttgggcgagatggtctcgccgatggccttgagctcggcgatgcgtccgcggattgtattgatgtgctgctccatcggggtgacctggtcccagcgcgtggcggtaagctgccgaaggagcgagtgcaggttgctgctcgacttgggctcgtacacgtccagcagagacgttcaggcggcggaggcagtcttgtggtcgaagacgtggaacgtcaggtcgttgccgagcgcctgtatcaggacgtggcaagctcggacgttgctcctacgccatttgtcgagctgggcgccgggctctgcgggctcaacctcgtcgccctcaacgagggcgaggacgcccgcatccttgaggtgcataaggtgcggggcttccattgctggaagacgtcgtcccgcccgttgaagaccgggatcttgaaggtggtcgaggtcggggcggaggtgccgtggatcgtttcgtcgccggcgggcatcgcgagcttctgtttaaagttggttcgggcaagggctctggggtcgtcggcagaggcctctggagcgggcggagcgaatgggggttcgggcgacgcggcaaacggcagcagttcaggggtggtcgataggatttcttgtcgagagtcgtctgagtcggatgatgcgatggatgggctcataacctgtaggacgaggcaggaggcagggccgactatagtgggggtgagctactgcctaggctaaaggggcgctagactagggggggcgaacgtacctcagtctcaggattactccgtgaacgactgaggtataggagggggaacgagcgggcgtctagctaagaggagggagcgaaaagagaacggaggaaagagtccggcggactctatggcgtggcgcccgggtggccgctgggcggtcgtcaggcgctggcggcgcgcccaggttcccgcgctgcgcccagccggcgccggcgaagcaacaccttcaacagtcacccgtctcgagaaggcgctcggtgtcctgtcggagacctgaggagccatctgggccatctcactcaccctcctcgtcgcttcggttctcgcggaacggccgacggctgcgctcgccttggcctaagctaagaggcagagagaaaagaggcggaatgccgatgcagtccgcgcgtcaggagtacatcggcaggcgcgcggcgccagcgcgcacgcagccgcctgctgctgccgctggctctgcgcgccgcgccgcactcgtcgcaagttcaacacacatcaattccatctaacggatcgccgttcaggccaggctcgcatctcaatcgccctgaagcggctagaggagacagacatcatggtcgacggtgtcatgtggcttcatgggcggtctatcgccacacaaaagtttttggagtatgctggggtcgactggggttgatcggattttggtcggttgggtttgccctatggcgcgattgaccactgagccctggacagctccccggctaccaggaccacttcattcgcttcatcgcaacgatagctggagtaaagcgcgagatttgggcttctggtgcgcaactcgccctctgaagttagaggacacgtgactgatgacggcgatcatattcaacagaacaatcatccatcgctgagtcagaggatcaaggcgctgctcgccgagctccggaacctcgtaaacgaacatatttgagatggcatgctgcactttgacatggcggtcggtcaaacgcttccttcttgccgctcgacgtccgagtcgagctgactgaagtctgtgccatacagcgtcgacgggtgcggatcggcacgacctcgcactcaacctgctttcatagcaacggcgcgcgtttccgggctccgagggtgcgtcacgaggtgcctagggctcctgcagcatctgattaaaccggcatttgcggtcaccgatgttccaatctatcctcggcctacggcttgaactcggcaagctcagctcgttccttcgtggagagaatttcggtgcagagcagctccgccgcaacaccctttgtcgttacccaaccacaaggctacttctgcattccattgcggaacatccgcacttacacttattaagacaactgtctgaagctgagctcgagtctgaaggggatctcggcgaaattgggaggcatggcaaaagcaagtgtcgctgacctgaatcgaacaggtgaccttacgatcttcagtcgtacgctccaccaattgagctacagcgactttgatattttctgcctgctagcatcaaccaaatactgatcaacattcttcataatgtacagttcgatctctatctcccgtcaggagaggctttggcaagcaggactggtctcgacgtcaggttccccaccaccactctgcgacgataggcaaaggtcggcgggattacatgtccggcagcgagccagcggtggccggcggcaacgccggcagggaatggacgtggaccaaatggaaaggcatgacaggcactcaaatgactgcaaaataccccggagcgctgcattctgccatttgattgacgccagggtgagcattcgtgtccaaccgagggtcatcgcctggatgacggcaggtgcgggcagatgacgtcccaggtagggtatctaccgcctcgcacgctgaccgactaccggtcagcgtgcgagtgttagagcagaagatgggttagcttgcgtgtcttcgaacccgggcccctatccaaagactcagagatttggcggaagttgcgagtcgagctgcaacgagatgggcagccacttgctcggctgtgcctgagagaaccgacggccggcctcgattgacatcgaccacctcgacacgaatctgataccgaatgaaaggcccccgtgcaacaggagccggggcggaacctgatgccgcaggcaggacaagactcgaccggaatgatggccaagggcgcatgaagcgccgacttcggcgaatcgacgatgctcgacgcgcccgggaccgtacagcgaggagcagccagagcggtcgcaacggcgcccaaaaggcagcattgtaggcctatgaggaagacgggcctaaggggcatcctgcgagcggtcgaccttgctcgaccggccaaggaactgccgacccatcgggttttagtcagagttagaggcaaaggagggtcgttagagcgaccagagctgcgagaagaagcaggcggcggtgaaggtcgagcagtggcttgctcgtgtcgatgacatccgttacttaaacgggctcgacatttacttgtacgtcctactctctttagacgatcgtcagctgttgatgccatccctctcaacaaaaattcctgtattcagtagcatgaccgacatctggattgctgaaccatttccagggtggcgagctaatttacagtgcctttagccggcttaggcgtccgctggacctggtcgtaagcaacagcctttggcatgaaccgcgccggccttcaatcttgcggtacaaccagctcgagtgagatgtactacttttggacgaaaggcaagatgatacccgttccttgccttaaaaaattatcgccgcggggaatcgaaccccggcctagtgcaacttgccagatggcaagcaccaatgaataccacttcaccacaacgatttgatgaaagggtcagatagcaaatagattcatccaacaacttatttgacatcgtctacaggcacctgccctcactcgactgtatcgtgcacgcttgtgttagtgaggcagacagccggtcgtacggatttgtgttgatgatcagagccttgcagtgaaagcgaccaatcgaggaagcacttgagatactgtacgcaagatcttatgcacattgggttttcggaacaacacatattagcactcatactcggtccaatggagcgtaagcaagaggcaaagtgcgggatggatctcagcgcgtcgagctctggctcttaaagcgtcagcatagtagtgagcggtcttgctgatagtcgtcgtgaccccaaggttttatgggagaggaggatggtgagtgagcgagggttagggtgtaacgggcatgcaatgacaaaggcgggtctatggacgggaggcgaggagttcagagctagacgagaggaggagacggaggcggaggaagggagcgcaacttagaaggcgaagaagcgagcacgcgcccgaagaagtgagagagaaagcaggcgggagaagagaccgtacgacgacatgagggcgcgccagtggtcgaagagggggacagaggcgggggagagggtgccggcggtagagagaacgagagggaagaaaggggtggcggtgcgaccgaggtacttggaccgcttctcgttctcgaccagggtgagggggacgagaaggctggaggtggcgagggcagcggcagggagggaggcgtcgagcgagggcagggaggaggtggcagaggcagaggcagcagcagagagggaaagagaagcgggagggggccgacgaccgcccaaggttgccgccgccacgaccgagacgtcgaactcggacagcgggccgttgtacgaggccgtgccggcaatgcgcaagtcggtccggaggtgcgagcccgggacgaacggctcgagcttgaccgtcgtgccggcgatcgacttgaggtgcttggcaaggagagctttgacctgctcgtgccgagcgatgcgccagagcgggcgagcgccgcagacctcgtcatggccgaggtcattgggctgggcgcagagggcacaggcgtcgtccttgccggggcagagcgtccggacgtgtaggccggcggcgacctcggacgccgagagacggagagcagggccaaaggggatcacagcaagccagcgtcttgccaccggggaggagttgtcaaggatggtggtggcagaggacgcaggcaacgcacagagtagagcctcgcgacgggtggcgaaggcggcttggcagcgagcgcgctgggagacgatgacgggggccgcgtccgggtcggggtcgtcggccggggagagggcagcgtcgacgagcaggtcggcagactcggccatggcggcccgggcgtgcggcgagcactcggcgtgcgacagtaggcccatgcctccgaggcgggcaggcagcgtcgcgaggccagcgtccgatgccagacgacgaggtgagccgcggatgaggagcagccgctcgagcagcgcgttgtcgagcgtgagccagggtgagtcaaggtcgtccgttcgaagcgagcgctgaaggtgccggaggttggcctgcaagcattggcggagcagtaagagggcctcctgaggcggcaggtcggcgagccggtcgatggccggcagctggtcggcgatgcgccggtcgaggaaggcagcgcgaacgtcaggagggccgatacaagtcccgaggacctcgaggccgttggcggcaaccgaggtaagcgacgactcctggcatttggcgacgttgagcgacaggccggcgtcgttgccgtcgaggaaggcaatgaccgactcgagcgctccggcctcggtcgagagcacgtagatgtcgtcgaggtaggcgagaacggcatgcgagtcgccgaggtcggcctgaagggcctcgacggtgttgcggatgccgagcgagaacagaagcgggccgagagggtcgccttgacggacgccctggctggactcgagcgcggtgaccgagccgtcggcgtcggagacgaacagcggcgtcggcgtatcgtacgcccagcggccggcgcgatagagggccggagcatgctgcgacagggccttggcgagcgaccgacggtcgagcgagttgaaggcgttggcaaagtcgagtgaggtgacgtgggtgaacggcttggggaggttgccatcgagggcccgctcgagcgcgcgcgtgatgggctctgtaccgccgctggagccgacgccgaactggaagggcagcaactgggacggagccgagtagtgacgaacgagggccttggtaaccagccggtacaggagctcgccaaccgcgatcggccggatgccgccgtcggccttgaggagcggcgtgagcctcgacgcgcaaaggagctgctggccaggagcgatgccctgggcgacctgccgtgtgaggagcagaacgaaggccgagacgtcggcgttgcccagagcgtggccgaggagcggggccgtccaaccggaaacgccaggggccgtgtcgggcttgaacgagtcaaaacactgcctgatgaggtcgagcgaaggcaaagacgacggagccgcgcccgaccgagggccgaagggcgagaccggaccaacggggtgcttggaggcaagagcggcaatggtggccggcgtgaggtcggcaacggacgagtcctcagcgagcaggcgagcggctcgactgagcttgccgtgctggacggcgatggcaatccgacgaggcagcgatgactcggacggccgagcgaccgagggggacggccagtcgacggcaggaaacgcggcgagatgggctttgccggcggcaggcgagacggacgtcgcgagctccagcgccggagctaggcctaccttgggcagcgcgaggaagtcgaacagccgagcctcggttggttcctcgatgtaggccttagcgagcgagccagcaacgagggcgaatggcttggaccacgcgagagggagcggcttgtggacggtccggcaggctgccagggtggcgaaccggtcgacgagagttacaggaggctcgacctgaggggtgtgtgaggccgaggggacgacaggtcgagcaccgccgaccgaggcacgacgacgagcagcggcgggccgaacgacgagcagcgagccgtccgagctgaccgagctcgtgggtgaggcgacatctggatcgggcgagccgagcgacgacaccgggagagcacggggacgggccggacgacgagctggtgtggtgacgaccggtggcgagacaggccgaccgtttgaggagctggtcgacggcgacgacgacaagagggagacccgacgtcgagccaactgcgagaccgtaggcgcacgacgaggagcgacggccgaggatgcgagccgagacgaggcggctggggcggaaaacgacgtcggaggggtggattgccgacaagcccagcctgagcacttggtcttgccttggtgcgtcttgatgccggcggtactgatggcgagagcaccgcagacgcacccgaagaggccggtcacgaggagctgcgagcggctgagccgacgaccggggtgctgccgcttgaggtgctcgagcaggttgacgtacgggttgctgcagagggggcaagcaaccggtgccatggcggtgggtgcgagccgagctacagtgggagccactggtgaccgagccacaacgccgatggcaacggggggtggggtcgggtcgggttgcctggtgtagggttactgcagcatcgaatagtgtaaggcagggtcaaggagaggcgggactggcacagagacaaacggggtagggtcgggtcggctgcctaggggagagtggacggaggagggaagtcgtcgagagggggaagagaggcgcgagagggagagctacggaagagggaagcgggcacacggaagcggagggtgaaggaagacggagcggaacagatgcggaagatggtatcgatcatatgttctgcgttattttttttttcaagcagaagacggcatacgagatgggcgctagccccgtgggctcggagatttgtaaaagagacagggggggggaggtcaggctcggcgagaaagcgagatcgaggggtcgcctataggatgcaagggggagagcgaccgccgcatggcgtgcagggaaaggacgcacccgtcagactgatccagccctcgaccctcccctgtgcctcggcgacgatgcgttcgtcgccttgctcaatcgctcgccggatcgcctcgtgcaggacctccttgaacgcccggttctcgacaaaatcgcttaacgcaggctcgcggccgtctgcaaacaggggcaggtggccgagggtcgtccgtgaggtggctgaaggaggcgggcggtcgatgaaggagagggcgaggagcgtcggcgacgagggcgggaaggggtggtagtggagcggatcgggccgggtcggctcgtcggcgtatgagcggcgggcagctgaagagcaggcaaggtgtccgatgttggctgcagaccggcgggcgagcagcagcagctggagggtcatggtcgctggtcgtggtggccgtcttggagggtatcggctcgccgcctgcttggggacgcgcatcgtctgtcgctgcgcgcgcgtccgagccagcaacgaaaacggcctcgtcctccctcagcctcgaccctcgacccgtcctccagaagattgcctcgagatggatcgcgtgccggtcggtcgttcgctctttgatgccagcaccgagttggatgacgtagagggctgacttccctgcccctctccctcctcccttgccggcctccctcttcctcctgccgccgaccctcgcagctcgccctgcacatcccgcttgcctcgattccctttagccagccgccaaacaagagcagcgagccaggcctcgagccgccaaagacggtcatccagcagcttgtcgacgatgcccatgcgaaggactatgacctcgtttgcctctctctcacgaacgcgtgcgtcccccttcgtgcctccctccctcggcggtcgatcattccctgccccctttctcctggcaaatcatgccctaggccgagagcgagccatctgcaaaggtttgagcccccgccgaattcaagctgacctgcccgaatgcccccccacccgtccgtcccacccgcgagcagcaactggcgcgagcgctgggagagcctttgcctgcgggctgcggacgcgccggacgacgtcgacagccggcggcggaccgaggaggacgccgagcgctggaggatgggtggcggcttcaagcggagcgaggtgacggtcacacggcttggtgcgttgcccttgttggattgcctcagaggggacggcgggtgggacgactggaggtgctgacgatctttgctgtgtgcgcccttggttggccgagcagaggagacggagcatctgattggcctcgcgtccgattggctcgagctcgactcgccagacgagggcatccgctttgactcggagctcgtgcgtcgtccttatcctactcgactcgacggcccgacctggcgcgtgcgtgctgaccttgcgagtctccacccccccggcccctcccaggccctccggcacgagattgcccaggcaaactacctcaacatccccgtcgtcgtcctccccccgccgcggaaccgggcgttcgtcgccgactatgcgcgggccgtcaacaatgtcctcggctcgacgacggccttcacgcagctctcgattcggatccccatctcggacccggccgagctcgttaaccacccgctcgacagcagggcctcggttggctcgctgccgtcacggacgaacagtgcgaggctgagcgtcgggagggtcggccagacagatctgagcgcgacgtgggagatctgggacgtcatccggacggtgtgcgggtacaacccaaagctgagcctgacgctcgacttgacgacgccgctcccgccgtcgccgggcgcgctcgcccgctgggcggccgagccgacccgccagatcctcctcccggcctcgagctttatctcaaacgcaaagggctatccagtcctgagcaaggcgacccagacgttcctgaaggaggtgatgaagcagcggccgaccatcatcctctctgcgacgcaggcgacctcgcaccctgccggcgggccagccgcctacccgcaatacgtccggcacctcgagcgggcctcgcgcgcgctcatggccgccaaggacggcgggatcgacgagctcacgcgcggctactgggactggctccaggcgccgcttcagccgctgatggacgacctccagagctcgacgtacgaggtcttcgagcgcgatccggtcaagtaccgcaactatgaggaggcgacgttccaggcgctcaacgaccggccagagcaccagacgctgtgcgtttgccggctgccccttttcagcctctaaccctaacgctgaccttctcgctcctgctgccctttagcgtcatctacatctgcggcgccggccggggcccgctcgtctcgggcgtcctgcgcgcgcttcagcggtcgaatcgcaaagcgcgcgtctacgcgatcgagaagaatgcgagcgcctttgtcacgtccgtcccgtcgtcgagctcggggccgtcggtcaaccctcccttccgcgctcgatgctgataggattcccccccctttgacgccttcctgcaggctgcaagagcgccaagcgctcgaatggggcggctcggtcgaaatcatctttggcgacatgcggacgctcgacgtgcccgagccggccgacatcatcgtctctgagctcctcggctcgttcggcgacaatgagctctcgccagagtgcctcgacggcgcgatgcgcttcctcaagcgtccgctcccctacacctgtgcttgacgtcgtgcgagcgcgagctgacccccaccatgctttcgctcccccttgcagccgacggcatctcgatcccctcgtcctacacggcccacctttcgcccctctcgtcatccaagctcttcaacgaagtgacgggcccgacgcgcgagcccaaacaggccgagacgccctacgtcgtcatgtttcaggcggtcaacatcctctcgggcgaggccccgcacgagcacgggcggtgcggaccgaaggtccaggagtgctgggcgtttgagcacccgaggagagacctcgtgctcgactcgcgcggcttgccgcttaccaactcgcacaatacccggtcggcccagtgcgtttcttgcggccgcctcgtctgaagcgtcccctttttcaccacaactgaccgctgctcgtccgcctacaccgtagcctgaccttccacatcccgcacgccggcgccctgcacggcttggcgtctgtccctctgtctcccccctcccgccttccctctgcgcactctcgctgacctgctagccgcccccttgaacacctcagcggctactttgaggcccatctctacggtaccgttggcctctcgatccatccggatcggcagcacatcatcagcccagagatgctcagctggttcccgctgtttttcccgttcaaggtgcggccacgctctctctctcgtccgcctctcttccttctgccgttgctgagccttcaccgcaggagccgctctatctgccgagcaattccgagctcgacgtccacatctggcgcttgacggaccctcgaagtcgcaaggtacgccgtcgctcctcctcaccttccgttgtcgctccctcactgacttttccttcttgttcgctcgccccaggtctggtacgagtggcatgccgaggccttcctccctctcccctcagcccactcgctcagctcgccctcgctcggcatcaacggcttcggcaacaacaacggcggcggcccgccctcgacgccgcagatgggcctctcgagcccgatgatggacgccgcccagctgagcggcggctcgttcagggacggcgcagagtcgctccttgcaggcgcggagggatcggcagcctcgtcgggccggctcaagattggccagtcgagcttgaccaatccgcagggccggagcttctcgatcggcctttgagatgaatgagcgattcttcttttggcaggccagcctcagtcctctcagtcagggccgctctatcctccgcctcttcgtctgtcgatttctgtgccgttagaggcagtcgaggagagatcatctggtcccatctaggtagacagtcgcacacgcatctggagagggagggagaggaggccactagcggagcgtgacgagctcctcggcgctggtcgggtctgtgaagggggttggcgcgagtcagcaccagcggcgagcatcagacaacctgcagccagtcgaaggaggacggacggatcgcgaccgtgtcgtccaggtccttcttggtcgcgcccatcttgacggcgacgccgacaaactgcataatctcgtcggacccttcgccgacgatgtggacgccgaggaccttctcggtcgggaggagcgtgacgagcttgtaggccgtcggcgtcttgtgcgccgggttgtcgagcatcgcgttggactgcgaagagagagaggatcggcagagagggtcagagagtgagagcattcggaaaggcgggcggatgcgacggaccatgccggtgaacttggtctggtagaccttaattttgtcctcgccgtgctccttcttggcctcagcctcagtcaggccaaccgagccggcggtcgggtgcgaaaagatgaccgacgcaatgttcgagtagtcaagcttgtcgtccttgaactcggcgccgccaaacagccggttcgacagccgccggccggcagcgatcgcgacgggcgtcaagagcgccttgccgatcacgtcgccgacggcaaagacgttggaggccgacgtcttctggtaggcgtcgaccgtgacaaagccgtgatcgtcggtctcgacgccggcgttggcgagctggagcgccttagtctctgggtgccggccgatcgcccagaggagcgtgtcgacctcgagcgtcttgcccgagtcgagcgtgagcgtgagtgcgcccgacgacgcgtccttgacgaccttggtaatgttggtctccttgtggatgttgatgccggtcccggccatgtgctcagtcagcgtgtccgagatgatcgggtcaaacgtccggagaaccttgtcgtgccgaatcaggaggtgcgtctcggacccaagcgtgtggaagatgccggccaactcgaccgaaatgtaccctgcgccgacgacggcgacccgcttcggctggtgctcgagctcaaagaagccgtccgagctgatgccgtgctcggcgccctcaatgtcggggatcgtcggggcgccgccgacggcaatcaggatgttcttggcccggaggctgtagctgctgccgtcagaggccttgacctcaagctcgttggccgaggtgaacgaggcccggccctggtactcgtcgacgtggtccttctcgaggttgcgctcgtagatgccgttgagccgcttgatgtaggcgtcgcgcttgtgcttgagcgtgttccagtcaaacgggatcggctgctcggccggcgcgtccgtcaggccagatacccggaagccgtacgagtgggcgttgcgcaggttctcggcgacgctcgccgtgtaccacatgatctgccggcgcgcacacaaggcgtcagtcaggggtatccgcctccacacaagtagctcttccgaggacagacctttttgggaacgcagccgacgttgacgcaagttctgcgatgggaggcaagggcgattgggatggccgtcagtcggtgagtcggtgcgaggcccaagtcgggccgccgacctccctcatgcagagactcaccctccgaggtagggcagggcctcaataacggcggccttggcaccgtacgaggcggcacgacgctgcgtgacgagcgcgagaggtgggcagtgtcagcaggagaggacgcccggcgacctggtcgagcagaagggacgtacagcagaggcgaggccaccggagcctgccgagagagagaaggtagatgacgaacagatcgagggtcagccagctgtgcgctaccctctgccaggagctaattcctgccaggagcacgctgccgatggcgaacggctcgctgaggagacggccgcacctccaccgatgacgaggtagtcgtactcgttggcctttgcagactctttggggatcggggccatcttgaagagcgaggtgtggaaggcgcgtgcagaggggacctggtggaagatcggatcgagcaagaggcaggacagacgaagatagccggcaggagcaggaacgaggggacgggacgaggggccgggacagagggagaaagaccagctcggtcagcccgggctcgcacgcgcgcgcgcgttcgtctcgagacggacgtacctggaggcggcggggctggaaggcgagtggtcctgcgggcgtaggccggaggagggcgaaaaggcgagaacgggcggacaggagcagacgaagttggctgaggggcgggcgggggtcccaacggcggtgacaggcgacgccgagcccgacccagctgccgccgacttggcctcctctcagcaggcggaccagcgcacgctctcgaccgacatgggatcaggcttgtatcgtgtccgtcctaccagctgttgctgcgacgccagtgtccgtcagggctggaaggaggtcgtctcctggccgcacaacagctcagctgagggacgcgcgcagcaagccgctcgcccaccttacccgacgctgtcaatcgccgacggcttcggcatttacctccaggccctgctgaaaggccacctgtgcgcaatcatgtcgtaaagagaacatgcgcatcaggcgtgcggtcgtcgttgaaggtcggtcgtcgatcaatcgtgtcgtgcggaaggttgcggctctgccgccgtcgacgtcgagcggacgaagctgagcacctcgcgttcgcccttgcaggcggccagctcctccctcgctcggcgcgcaaccgcctcccactcgtcaaccatcgcccgctggccgcttgccagaaattcggccgacagcgccgtcgtcagagcaagggtggctgagagcgccgcggtttgctggccggccgcgtcggacgaaagcgtgagggaggcgaccgagcccctcagcgtccgaagctcagccatggccgccgccagatcgtcctgcgacgcctggaggagttcctcgagcgcggccgtttcctcgcgcgtctcatcctcgcgaagggcgagcgtctcgagctggacccgggccgcctcgagctcgatggtgatgttggccgtccggtcttcgtcgtcgccgtcgagcgcaggatgaccgctcgtgcgcgatgaccgggctcgctcgttgtcgagctcgcgctggagggcggcctgggcgaggaggctttgctggagccgtgagcggagggcgacatggctgacttcgggcgtctgcggcgtggccggaaccggaagcgggatgaacgactgagttgagctcgagccggacagtgttgcgccgaagagatcgctctcggtcgatgaggtcgtcgcctcacgctgctgccgactcgaccgtgtgccaaggctcgatggtgggctgccaattttcgacagggcaacgacgccgaactcggatgcgtcggcgttctcgacgaggagcgagtcctctggtgggaggagcgtgcgcgacatagcctcgaaagagacgagcgacgaccgtggggcgaggcggccggcggtggagagtagtccaacggccgtttttgacaacagcttcttggccgtaggcggcgacagggcgtcaagctgcagcggccggggcgaagggtaggacagcgacgagcgaggaggcctgcatagaagggcaggcggcatcagctattggtcctcgcgcagctttcgatggcgcacactcacaggccaaggccgacggcgctgcggtctggcgtcgcagcagtcgcaatgctgtgagatgcgctgctaggtttcgggacgacgattttggtcggcgtcgcgtgcgcgcttgcgacgcatgggcgaggctcacatgcggccgtggcggatgcgacaggtggcgaggcggtgcgagcgaggctgccgacggtcgatctcgggaagaggacggacgccggccttggacgcggctgaggtacggcagacggacgggcgagggacggcgacggcgcctgagtggtcgagagcgaccgccgatgagtcctggcagccgcagccgaaggtgtgggtctcagcgacgtgggtgcgggcagcatgctcgtcgtccgtttgtggttgagcgtcgcgctctcggttgcgactgacggcgagcccgagacctttggcgaagacaatcggcgaaggtagctcgcatcactggagatgctgttcgccgtcgtcgtctcggccaaggcgacgcgaccggagggcatcctggtcgtgcggtctcggccttcgggacgcgagacgacgccggaagtacgagccgaaaggcgggagcctttagtaggctggctcgggccgtcaggcgccgcagtggacggcaggagtcctccgacaaggggtaggggtgcgtggccgagcgcgaccggcagctgatttggcctgtcgacacttgcagacaggtcggcagaaggcgctcttttgtcggagaccgccgctggaggtacggctttgccctgctcggaagacggtcgattgctcgagccacttgcggccgaagatggacgggagggtggcgacgccgtagacgttgagaggccggcggcacgcgttgccgaggcggttgacgcgactgctgttggccgaagcgagagtcgacttcctccgcctccctccggcttggaacctattcctccagggatctgagagggccttagcctcgtccgcggtgcttgcctgagcagtgatacgccccgggcgacaggggcgccggccaaaggcgagggctcggaggaggaagcgaccgcttgcgacaggcctcggatcccggccacagacggggacgacgggagcgagctgtcggacggcgaggcagaagcgtggcgcgagtggccgacctcgttcagatccgagtctgcagcgagcgacagaggtggcaggtcagggctggtgctcgacgatgttggcgaggacgacaggaggggatccaagcgggggagggacgcacctggcgctgcctccgcggctcgctcgcgctcgttggcctttggcagcccagctttttttgatcgcaacgagctcgtgaccggcatcgaggcgagatgagcttgggaagaggtgttgagtcccgggtcgaagtcaggacggaagctgcgggtgagcgagcgacgcggtcgcgttggcacgagctcggacgcgcgacggcggcgcaaccgagggctggtcgagagggaggaggcgcaccgtccctgctgccttcacaaatcgaccgctgttgcagctgatggcttactgatgcaaaggaggagcctcctacttcccagcctgcatgctgaattctatcgaggaaggctgtcgcggccggcagacgcaccggcttctcccggcctgcctcgaaaggggcaggccgcgcttcgacacctctttgccgaccgacaccgacctcaaaggacccctcctcgccagccaactcccgccttctcgctctgcatctctcatcgcaagcgcctcgaccgctctatctctcgctcgcttgccggacttctccacagcgcgctctcatcgtgagcaagctggccgctcctcttgccttctgcccgcgagatctcgggctgacgcccacgctggactctcccagccggccatctctcggtagacacggctcgcagacgatgctccgctctgctcagcgagcgctttctctggcaaggctctcctcttcgcctctccgagctgcgaggcccacatccaggcgctactctgctcgggcagcggcgagctcggcctcgccagatgcctcgcccaccaccggctcgagctccaaccgctcctccttcgggtccacaacttcagccggacccgcgtcgacctctgcatcagcgcgtcaatcacagccggcctctgaacgcatgtccatctttgacatctcggacctctacgacaccgagccgccgtcgatagcccgcaacacgccggcaccgctcgagtcggccacaccctcggctgccgccgccgcctctgtcgcttcggtctacttgcctcaggcgagcagcgaatctgataacctcggctcaggcatcttcgacacgtctgatctctacgatccagagcccagcgcagcgcttgtagagacaagagagccggaacgcgtcgtctaccacttcgccttcgcctcggacagatgtcccgtcaaggtcagcgtcacaaagccggtatctgggcgagagctcagctttcggttcgttccgaggcgggccaagacgatagcagcgacgtcgaaggacgccttctgtgcccctgctcgatgggtccgcgactctgacatctcagcgcggtccatcgacccgcacacgcgccagaaagtccactcgagcggctcgatcgactgggcaaaggacctccgactccgttcgtcgggcgagcccgtgaagctccttctgcccgtagtggacgctcgggtcagcgagatggcgctcgagttcttctgggagtcgccgccgggcgaggacgagtacagctccatcatcccggtctcgctcgtcagcaacccgcatcatggcagcacgggcctcctaccagcaccttatcattggtccttaaaggagtttagtcgccaggacgtcggcagggacggatcgacgccggagccgccaaagaaggtcacgttcacatacgacacgttcaaccagatcggaggcctccacgccgccctgcgtgccttgcgccagtgggggatcatcttcctcaaggacgtgtcgaccgaggcgaccgacgacgccggctgcgagctccgccgggtcgccaagcggatcggcggcctccgcaacacgttctacggcgagacctgggacgtcaaggcgctcgggtcgcaaggccggaacgtcgcgtacacgaacgtcgacctcggcctccacatggacctcctgtgcgtctaggcgctcgctcgcccaattcagtcctttcagctgatgggcatctcacttcccgcctgcgctaggtactttgagaacccccctcagatccagctcctccactgcctccgcaaccgcgtcatttcgggcggcgactcgtactttgtcgacagctttaaggctgccgatcagctcaggcggaaaaaccctaaggcatggaagctcctcacccgggcgccggtcccctaccactacaagaatgagacctaccactacgagtttagccacccggtcatcgagctcatgccggcggcgctcggcgcctcggccgaggtccggcacatcaactggagcccgcccttccaggcggctctgccaccataccagtccggcatccttctcgacgcgatggccgccttcgagaaggagctccgggcgcccaacctcgagtttaagatgcggatgaacgagggcgacctcgtcatttttgacaaccggcgcgtccttcacgcccggacggcctttgtcgagcccgaagcaccgcccgctaagaagggcgagaaggtcgagccgagccgctggctcaagggcggctacgtcgacggcgacgcctcttgggacattttgcgcacactcgccggcttggaccccgaagataggcacagagtgacccctcgtctggaatgacggtagctctctgacttgactttcgcgaccaagtgaaaggaccgggcaagctaattgcacaacatggatgggaggataaggggatcgagaggcggcacgagggcagcctcgtacacagagagggcgtgggtgtcgggcagtggaccagggggcagagatggcgtttcagtagtcgtcatcgagcccggcccaaaaggcggacgagctcgggctcttgtcgttgttggcatcggcgacgacgtccgagcgatactccttaaggccctcctgtatcatctccttgcggccgccgtacatccggcctgcgctcggcgacgacggtggcgtttggagcgaccggccaggcgacgacggcggtgagcggttggaggtcgacgacgactgcttgcggccgcctgcggacaggagacgaggctgggagggcgaggtcgaccgtgcaatgaacgactgagagccgtccagaccgggcgaagaaggtggcgtcggcaggccggtgaagcgtcgccttgaccttgatcctgggtagggaagtgacaatgtcagtcagtcagaagccaaggccgctgcacaagtcggtcggacgcaccaccttccgcaggttgatccgagcggtcaaggccgtcgtgcccttcctcggcgatgccttcgagctggccctcagcgctcggccggcggtaaggcgaggcctggcccatgacgaacggtcggtcgagcacgctcgggaaggcagcgaggtcgagctggagcggcaggacgggcgagtcgcgacgcttcaggagccggctcggtccggcgacgggagaatggaaagaaacgtttgctggcatggctgagcattccgaggtggtaggagcagtttgtcgaggtggactttgggtgccggcaccctgcgcaagagcggccatcgtccttcttcaggagagggcgaggacggtggttgctttgcttgagacaagccgcgtcggagggagcacggccgagcgaggagccgacggcttgctcggatgtcctgtggagcccggttcggttgctcctgcttggctaccaggtgaggtcgagctggatggtaacgggcgggggaggctggacgtccgttcgagcctgtcgagtgcttgagaagaaggatgacgacgggcgggtgggcgtgcgagggagacgaagggaggccccccctccccctcctccacgcccgctggcggctcgtcgtattcgtgcgcgaacgagcggtcgacgagcgagcggccggcaaagaagccgacgccgccgaggaggttggacgtcacgtcttgggcgaagcggatgtgttcggggctggcgtaggcggccgggagagggaggttcgaggcgaagcgtttggcgtaagaccgctcgagcgtgctgagcgcctggtcgatcacgacgcgcttccccttccccttctcctcctccgcgccgggaacgccttcgagagggtcgtcggagaagtcccctcgctcatagacgacgtcccaccctcccttgtcctcatagctcttctggaacgcccagaagttgctctcggccgcgccctgctggacgttgccgagcgacatgccgagcacgtacgtctggtcggggaggtcggacgccttgggtcgctcagactttgagaagcgggcggagatggcgtgggctgtgcgggagagggcttgctggacgagctctgcgggggcaggcgcgtggtttaatggtctgcaagacggtgtccttgaaaggcaggcagacgggccaatgacacgcacccttggcacgccagacgtctttgcccggcacgctcaagccgacccacgacgtcctcccgacctgctcggcaaactcgcccgccatctgcggcggggctgcccactgggacgcctcgtctgtgtggtgcgaaacgggggagagggtcagcggaggacaaggtgacgaagagggaggaggttaacgacagacggtcggtcagggtgatgcggaacgggcccagctcgggcgtctcgccgaggaggacgatcgggcctttgaggccctgcgttgcgagcggcatcgtcccaagcgctcgtttgagtcagcccatcacggtcaaacgtaagagagggcaagagggccgacgcaccttctccatcccctcctgctcgacaagcctcaaccgcccctccccctccaacgcaatgtaccacaagccgctcgccttcaaacccgcctggacgcccttcatctcgaccctcgccccccactcctcgccgccgcgcaggttgacgaagccagtctcgacgaggaagccattgcgcgcgtcggcgagccgctgggtcgagccgagccgggggaggtgggaggtgaacgtgtaggcttggaggccgccttcttgtggtttggcggctgaggcttcatgatggagccctgtcacgccgaaggatccatccagtcagcttagtcaaggctgctcgcagctcgcaacggaagcagcccgagggaggagagggacggacgttggatcccctcccaatcgttcagcccaaaccacatcagtccggagacgagcgacttcggcaggcggggccggacggcaaagtacagctggggggcgtaggtcgaccagagcagggccgggtcgtcctgctgctggcgggcgaggggggtcagccgtctgtcgtcggtagtggcctcgccggcgtcggctcgcgagatggaaggggtgacgcacgagtgccgaggccgagtcattcgttggctgttgcagctgagcagccgccttgcccccgctcacaaggagcaggagcagtggcgagagcaacgagaggcgcatgcttgcttgcttgcgaggggggagatggtcggaggggtgcggtgtgcaagggcgcgtttggcgtggcaaggagctcgagctgcgacgcgcctgagtttcgaccggaagccctctttcaaacgaggccctgtcaaactccaccaaacgctctcaagacagaccaagagtcgagctgaccatctccgctttctgacagtgctggtctcatgcactaaagctgttcggtggccaactttttgagcactaatggtgagagggctcagacgaccgcgcagcaaaaccagccgcacgccccactcgccttgccacgtctagcgctgacggccgcagattgctcgttgttgcagacattccagacgatcgataagagtgcagagcccgggcgacgttacatgttgagaaacttctgcgtgcacgagtaccagttgaaggagaagctgcgccgtgggagcgggaaggatggcaagcagcgtcagctgaggcacgcacagctgggcgacaaatgagacgggcggcgcacctgtctaagaaggaggaagagatggcggacagtgtatcttgtcagctactgaccccggcgacaggatgcaaggctcgggctagagaggcttaccgtgcgggttgcaagagcagcgaccgcgcgtgtgctcctcttcctgaggacaatgcataaagggttcgtgcctgtaacctatgaacgcctcgaagtcacagagggtcagcatcagaacctctacgccgagagcggcaaagagaggcacctaccaatgtcactaaaccacatgatctgctccttcttggcgaagagggcggcgccgatcgagtggacgggcgcgtcgccccagcgctcgtagtagaagccaccggccttgtcgagaaagtcaaagtaggcctggtaaggctccgaccgccagagcgagagcgcgccaatctcaaagttgctccagaagtgacactgcacgggggttagaaaacaatgtcagtcaggccatcagctgtgccctcttgcccggccgactcacgaggttgtaagtctcgccattgtcgtccgagaggaacttcatggcgttgccctccatcagcggcgcgaggtcgggccggctggcgagaaacttcttggtctcctcccagagcgtcggcaccgtctcgacatactcaaagagcgagagcgtaaagccatagacggcgcctttgtccatcatcgccaggaaggggtcgtaggcgaggtcgcagtagaactgttgcaggctcgtcgtcagcgggctggtcgctcgaggctcaatctgcgatggaacgcaccttgacgctcggctcgacacgccagtctgcgaggcggcgcaaggcattagcgaaaagcgcaagcaggggcgagtgagttctgtagactcacagtagtcgtactcggccagcatcggatgcttgtagaagaagccggactgcagagggagcttaaattgtcagtcggaagcaggaggtgacgaccagacacggaggggagctggcgcacgttgaagctgagggcaagggtgtggcaactcgttagccacttgactacgcggtgaaggattcgaggcagaaaggagagagacgcaccggcacatgttgcggtaagggactgagtgaccatagatgacctgaaggtggcggctcagtcagctcggccgggacaccgactacgaggaggggagggcgcgccttcttctcgatcatctcgttccgtgcggccgtcgccttctcttcatcgatcctggtcgcagcatgggcgtcaatgtcagctctggggcgggcccatacgagcggagggggtgcgagacgcaccattcgggctggtgccagtgcgaaggttcgataagcccatacttgcactttgacggcgtcatctcctgtgtcagcttcttgaactcgtcgctgaacggctcctcgttcaggaagagccagtcatagcctgccgggcgagcaagcggcggtcagcaggttcagggcactcggcgcttggcgagccaggcggggtccgcacctccccagtggttaaaggtgtgctccatctggcccattgatggcaggatctcaaacaggtccgagttgcgagctgcggaagggaaagacctgtcagcataagccgtccgagcagatgggctcaagatgcggagccgagggtgacgtaccttgccggcgcagcgttggccagagagagacaagcgcgtcagtcgagagctcagccgttgccaacctcgaagcgggccgactcaccgagcacgacaaagacggcgttggctttgcgccggccgccagcctcccacgtcccgttcggcggcgggcgaaggctgccctggagctcgtggcccttgccggcccacgagccgggcgagtggtagtcgcctgccggctgagaaaggtagccgccgcctccgaggatgcgcgacggtcgagtcgaggcggcatagcttgagctcgtcaaggagagaatggcgtgaatcgcaagctgtcgggcagagggtgcgggaaggggtcatcagcacggagcagctaaggggggggtttcagcccgctagcggaggggcgagttggcgcgcgcggagggacgcacgacgccgagcagcacgagcggtatgagcttggccgccgagcgcggtaggatggccatcgtgaagggaagctgcctggacgataaatagagcttcaaaggggggtcggggcgagagggagatggacgccagagcgaggcaaagtgcttgagttttgggccgtcgtcgcgagccaccgagacaccccgggctccaggcgcgcgcagaggtaggggtcgcgacttacctgcgcagcagccccaaaaacccgttcggcgcgacctccacccccgtgaagcagtcggtacttcggcgtcacaaagtcattacattgcatcaaaaccgatatattacccaccttggatcaaaaagtaacagcagataatttgcctcctccttcgatcacaaggtaaaacgctaaccccctgccgggttcgaaccggcgaccctttcctgtccccaataaagtaggaaggaaaaactctaaaccactgagccaagggggcccgaatgtcgatgtaaccgaatgcaagacacaaaaatatatacccaaaagcttgatctttcgatcctaaatgattcaaaatgccgccgccgtcgcgatcaaggacgcgctcaccgcccgggttcgtccttgaaagaacgccttgccacctaaacctgctagcacgtctcctctcaccttctacctaactcaactcgctagagtgatatcagccagtgctgactgtcgctgcaggcggacatcaacgtggaagggccagcggcacgctcgcagcggctcgaccgactctgcgctttcctcccagtcctcggtttctcggatcccgcgggcaatcggccggccagactatgcccggcacaacgcgcagcagtcgtcggccgacagcttcttcttggccactcttgctgctggcagtctgggcctcggcgaccgcatgttctcgcccgaccaggcggtaccgctcttcccgatctcggcttcgcccaaagggctcgcccgacgactcattccagtccgactcgttccagctcgagctgagcgagaacgaggcggccgctcacttcgactcgtccgactcgctctcggtcgacgagtgccggacgtcagctgactcaggcttcccgatgttccgcttcgtgtacgagcgcgcatcgtcgctcgaagagtcggccgagtcggtctctggcgccggcgacgactcgttcctccagcccttcaacctcaaaggccaggggcaccagtatgttcagctcggacggcgacgtcgatccggagaacgacacgttcgccttcaagcgcgcaacccggcccgaggagctcgatctccggctgcccgttccagagcagacacacgacaaggagcggccggtcagcatgcccaacaccggcacaagcgaggacgacctacaagactggcggctagtcggatcgctgtacgccaacaagacaaccaacgtcgtcgtcgggctcgtccggcccggcctggcttcggtctcggcttctcggccaagcagctctccactggcgaggcactgatggccgtcgaggaggaggccaagaatgcccgtcgcggcctctgaagctcgtacgaccccgcggtcgagggagccgagaaggcgttcgcggctgcctcgctctagccggcgacggcccttccgacctcgtaccaggacgtcatcgtctcgcacgtccggacgacgccaccgtttgccttctacgtccagaccctcaacgaagccaacaaccaggcccaggtgctcaagaagctgatgggctagttcgccaatgaccacaagacgacggctgccaaggcgccggtcggctggtcgcccaagcccggcgaggtcgtcagcgcctagttcaccgaggacggccagtggtaccgcgctcggacgaagcgcgtgtcaggcacgcgcaaggagttcgaggtcctttacgttgactagtgcgtccgtctagccggccttgtcgtccttttctcgacctgcctgccgatgacgactcggctttgaccgtgaacagcggaaacgacgaggtcctgcctttctcgcgcctccggccgctcgacgccaagttcaaaacgctcccgcctcaggctcaggaggcccggctgttgtttgtcaagctcgtcaagcccgaggccgactacggcggcgagtcgctcgaccgcttccgcgacctcgccgagggccgcaatctcatgcgcgtcattgcaccggcggccgaccgcggccttccttcagcccatgaccgtcagcttgcctctgctcctcctccacctagtactgcccacacatcttcaaacatctcaacgatcacggccatctcaagagcttcgcctatactagaccttgaccttctcggccctcccacgtcgcaccagcccagctcagcccagcagcccgcctctggccggaccgtcgcctcgcaagctcgcaacatctctgcatctcctgtctgcttcttcctcccatctctaccgctgtgagtctgatgtgagtcctcgtcctggccgtcggtccgtaatgaccccggtcgcctcacattcgccagccgcatgtcgtccggttcgaaggccagcagcccgagcgcagcccctaacggcgccagcgagccgagccaggctacaaacggcagcgctacacactcgaagtccatcgcccgcttggactgtgtgcttcaggctacaggcgttcaggtggccgtcgtcgtcgagcaggatgaggtccggatcgtcaagcgatccggcaacggcaaaggtacgtcgtctgtcgtgcgcaggcgacccgtctcgagccagcttgtgctccgccctctgaacacgccgcagcgaaccagcattcgctgacaccgtctgatgcttgaatttggtcggagcagtgctcttcgcgatcccgacgctacacatcctgtctgcacgctatctgctggccagcggctcggctctggccgcagcgccgaccccactccagatcacgtacctcggaccctcggtcccgcacagcctgatcagccttcagctcctgcctacgctgtcttcaaccgagccaaaggtcgacctggcctcattcctcgagacgcttcaggcggcggcttacccccgaacaaagcctcggcggcgcgtctacctcgtcgtcaacccggtcggcggcccaggcaaggcccgaaagatgactcagaaggtcgtgctgccggcgctcgaggcggccggctgcaccgtcactgttgttgagacgagctcgaacggccaggcggtcgagttcggccgcgagctcgacgtcgacaagtacgagtgcgtgtcctgccttcctgagagttctagttgtaggctcttcactgaccctgcactcttctggcggccaccgtcagcgtcctcggctgcgtatctggcgacggcattctacacgaggtgctgaacggtctcgccagccggcaggacgcgcggcgcagccttcgcctgccactcgttccggtgccgtgtggtgggtcatagcgaaggccatcgaccacacttgcgccggcgttaatcatcgttcctcgtcacaggcagtggcaacactctctcggtgtctctgcacggcaagacgaccggcttcagcgtcgcactgtcgacgctcaacctcatcaaaggtgcgagctggcttgtgtgcggcgcggcgatggcagtatggacctactgacaagagcgcccctctctgatacgcaggcatcgtcatgccgctcgacctctgctccgtcacccaggtcgaccagccccgaaaactcagcttcctcagcacatcactcggaatcatggccgactgcgaccttggtcagtcgtctgcccgagactctccctttttttttttcgctgagccttgtgcgtctcgacaggcaccgagcatctgcggtggatgggcgacgcacgctttgtctacgggtgcgtttgccataggggcacaagccgactggcgtctcgctgaccccacgtctctccttcctatctgcagcttcctgcgtggcggtacgtgtgacgtgccgcttcgtccgagccaagctgtgtcgctgaccaagctctcccctgtccgcccgctcgacagccatcgctcagccagactgggcaggctcggtctcaatgctcgtcgaagagagcgacaaggccgtcctttcgcggcaagcccgcgcccgtctcgatcgggacccggcagaggtcgcagccgagatggcgcaggtgaccgacgcacctttagacgacgcagagggcgagggcctgccgccgctccagtacaccaacggaccgggcgatgggtggctgacgatcgacgggctcgagaagggcaaggaggtcctttacgtctagtacgcgcttcctcgaactgcgcacacgcaagcaccaaccgctgatgttctttcgtcggctcgtctctcgtgtgtcacgcagcgccggcctgacacctgcagcaagccggtacctgcgatcgcgtcgcaagtaaaccacctggcactgctgactgacgacgcgtgttctcgacagagatctcatccagtggccctttgtgaacccaggcgacgggctgctcaacgttgccgtgcagagaaaggtgcgcccgcgtcgccgacgactcaatccgcttcgcaattgccgctgacatcgagcgctgcacacgctccagaccgcccgcgcaaccctcctgtccgcagcggccacgacggccgaatttggcggccacatctaccaggactcgacccagtactaccaaggtacggtcagtagcaccgctccctcccgcgtcacggctcctgaccctttttccgtcgccgacacagcgcgagcgatgtatgtcgacccgacgcccgagcgaccaaacgccaagccgcagaacaagctgccgctcatctcgatcgacggcgaggccgtctcggccacgcatggcccgctcatgatcgaggtccaccgcgcgctcggccggacgatgagcctcgaaggccgctggcagggcgccgacgagttccacaagaaggggctgcgtatctaggacgaggtcaggtagcgcgctctagatgtgaagccggtcctcagtacgagcgtttgtcagcgtgcagaaagtctgaaggtcagccggctgaagattgtccgcagggccttgccttcgctccctttggagaccatagcacgggcccctgtgcctgtagctctcgcccctctccccccggtcgacggcccagcttgtcctgctgctcccctatgagttgatctggcggtggcatggtaatcgtctcctctccttctcagcgcaaggctccgtttacttctggtacgaccagacgttcttaaggactgggagaaggggcgacggtgcagagtcagcgacctgcttgttcacgagctgcgagcgtgccgacagcgtggaacgggacgcacgaccagcctgggtcgccagccggttgatcgagtcgtcagcctcggcgttggcccgaacctgaccgacaagagcgatgacggtgccggcagcgcccttgatggcgacgccgttcgagtcaacgtcggcgacggtgatctggatcgaggcgtggtccttggcggtgatgagccggcctgaggaggggaggggagggggtgaggtcagctcgagcgtgtcttgcgagactgacgagtctgaacggcgacgcaccagtggcggagcacttgcgggggacgtaaaggtcaacgaggacaccctgagagagattcacaaggggaagggtcagcaggcggctccgacgtcgagcccaaggccaagcgtgtgcggacaggtctctcgggatggcggcgcgagcgacacgacaccaggctgccgctcgaggggcaggacgctgcgccctggtaggggcgaggcatgggcccccagaagaggcgccttagccggtcgggcaggccgcagggacgacgggccgagcaggcgttcacccatgcccgcactcctagctgcctgctccgacaaccccagtcgctcctctcccggctggctcgccagcaacaatccaggagctgcgctctcccctgacagtccaggcggtcacagcgagcaaggccctcaaagcccgactggtggtcccagcactgcccgcttcggaagagcgcgcgcgctccctccgagacctgcccgtcgcgtacggagttggatgccagctggcttgacgaggatggcggtgccggaacggacctggtcgttctccattttgacgaaaggtttcggtagaagggagggttgaggaaaggcggggttgaggtggctggagggaaggtagggccaaaggtccaaggtcgggtcgggagcaagggccggaggtcggagcaagaggttcagcacgtagcgagcagcagcaggcagcagcgacggcagggggcgtcgggcgagtagcacggaagaaacgggcgggagaggcaggagtaggcaggacgtcagccgccggtcatgacgagctgccccgaggataccctccccccgtgttgcgagactcacactttggacgacgacgatcaggacagggtctctcgagctctcggacgggccttcgtgccgcccgcgccggcggagcagcctgcgcgcgcgggcagccctgcgcggggcgcgctcgttaggccgatgctggaccttagcctggcgcgtgaaaagtcattcccaggctcgcgacgtgtccctgaaaccggccctcatcaataatggggaacagcctcaggccggtagcgacgatcctgagctacatatcgctcgtcacagctgacggaaatggttgcggatagcagccgtctgggtagtgaggcgtttggagatgcctagggagagcagccaggtcaggatgcgacggcccgcctgttgaccgtcgccgggccgaccgcctcagccccttttcgccctctccctcgacgacgtccgcgacccagctgctgacaaccgcattctacacatgccatctcactgacactcgagctgaaagagggcttttgatgcaatgggcggtcttcgccttgcccggtgcagtcgcccgccgcggcgagagtgtcgccgtcacgtcgttgcctctcgcccgtccctcgtcgctgccatgtccacattgctatcaaagcacgtcgctgtccggcgccccgctgacaaaggatgagagatcaggacgtgcgttctccctcttgatgcagtagccccagcgcgagacgcatcgacaagggcatcgacaggggcatcctccagggtgacctgtaggtcaaagcggcgctacctgccaacagccttatatcgcccttggccgttcccgctgcgcgcagaggcccaatcttggtccgccagtggcggccgtctgggagcccaggagatgtcaagtggcacactctgacaagggacgccgtcagctcgcacgaccacccccgaccgtcagagctcctcctgaccgaccagtgacttcgcctaccgcactcgttgcaaaggcgtccgcgtaaagtatttgtgcctgcgcagcgagcggttccacgcggtctgaccgccgttgcaggcccgatgatggagacgaacggcggtcagaaggagatgtggtcattgcacgacgacggtcccgtcggcgactactcttcgaagtctcgtcgaggggcttcagccagctactcccgcggtatcacgagcgggccgatgatcggcaggtcttttttgggtgggaacccgagtcaacgttcctcgagcgacaatcacggcgtcacaagcaggatgcgcaaatgctcgccggtcaatcgaattctgctccaaggcagccggccacctcggatgtgtcgtcgagtgcccgggtcacgcgtcttgccctctgggttctgaaccagggcttcgtcttcgtacagccaggacgcccgttgcccggctgccggcgacacaagggcgttcggcgggttaggtacgactacggcaggccgaagcccccgaggcggcgactgaggtacctgatatgcgcctgagaaagccggcccttgggccgggaagactgctcggcgaatcaaggtagagacgttggtcagaggaacaaacgcgctgcatttgacgcggtcagcagggcaccgatcatcagatgacgtagattctaccggcctgtcgaggttgatcgtcgagatcaaatggacgcctctgaaagtcaatgcgcatggttacccggcagaaggaataacgtcggtgcgctgtgcacggcgtcacagtgctcgtctgtccactcgatctgcgttactcgacggagtgagtcactcttgggttcgctcaaacgcgccggtcagctcaggagccttgtcagtgaaggctaggcgctgcaagacgctcaggagggcgggaaaggccactcgaacgcgcagccgacgcgggctgagggggactacgagaccgaggcggtccggcgcggcggtcgggtcagcgaggtgacgccgcattcgagccaccgccagtcgtcctccttgacggcgtcgccccagccgtcgcggaggacaaattgctccttgcgggcgtgccggcaccagcgcgggaggtcctgccagacggcgcccgcggccgaaaacatggccgtcatgtcgaggctgagcaggtgaacgctctcgagctgcgggaaggcccggtgagtgattgagaggatgagctcgctcatcggcgacgagtcgaggaacgggtggtccgggtcctcacgctccttcagcgggtgaagctcgagcccgagcgagatggtagtgatgttcggatatggggcgaggtcgaatggcatcgggtgcggcgcaaagatatcgagctcaagaaatctgcggcggcagaggaagagcgaccttttgcgtcagcgaagactcgagaaggtaagtcgaaggccagctcacgcacttgaggttcgggcagaggccgagcacgtgcgcaaagacgagatcgaatgcctcgcgcgtgaccgacaagcggcctgtgggcgaccaaagggagagggtatggagcttgcggccgtgcgcctggcagagcatctcgagcgtcgacagggcgaggccttcaaagtttgaccagtgcgtcagccgggtgagggccggcaagttggccttggcaaaaacattgcaggtcgaggcgccgtcgcccgagatggctagcgtatgaagcattggcaggtcgacctgtggatgccgcgtgatccaaaattcttcttgattcctgatcgggcaaggggatgagggggcattcgggaaggtcagcatcagacgtgactaacgaccacagccgccactgcctcgaccgacgcacgattcgccgatttcgaggtgctcgagcgattttgccacggagacaagctcaaaaaaggcggcaatgttccagcgcgagattggaaaccagtcgaggtccctcagcgagggcgcgcactgtgctcgggcgagcgccgtcaggatgatcgctggcagcgttgcgagattctcagtgctgtcaaagagaaacagcctgcggcaggcaataaagtgcaccattgtcaggccaagcgggcgactagtgctggcaagagcggaacgcgcgcacctgaggtttggcaggaggaggatgaggtgcgcgaggacccggattggatggccgaacatgtcgctggccgagtagtcgacctggcgttcctctccgctctcgtcaagctccatgatcggattgccctcctcgtccttgaggttgaggtagggcacgaggtcaacgtctagcctcgttggaaagacgcggaggtcgggccgatagacgaggcggccgcccgtctggcgtaaggcgagcggcaaagagggcagggcgagcgtccgtgcgaagccgataatggccttctcggtcgtcagccgaagatcgcggtagaggaggggtgtgcagatggcctgcaagagtcaaggccgtggtcgagggtcagccaagagccacgttacaagccgcgggagtgtccggcgtcccctcaaagagcgagggctcggacagacgtacgttgaactcgcgcgagacgagacacagctggtagcgcgtccattgcgaggagtacgagaggcgccagaagccgaggccgcagaccgagccttcctgctcctcgacctgggacacgagcacgcgacgcgatgggccgacgccggtggctgtcagcctaggacccttcattaagcatgaccttgactcgggacggacattattggtaacggccgtgtcgaagatgcggcctggcgaggcgtggatgaagatcttgcgccagctaagggcgaggagcgaagatcaaggacgtcagtcgggtcgtcgggcgacctcggtctcaagtgaggccggccggcggtgtcacgactcacagctcctccggtagggtgaacgcctttcgactggctacgaccggatcgactgatgccacctctataagctcaggctgcagctcccccgctggccgtccttcgagaagcccgggctgcagctcgacatcctcgaggcggctgccgagctcgctgttgtccggggcggccgccgttgccgagagccgctgcagcagcctggtggcctcgtccacaaactcggagtcctcggcagcatccttgtccgacattggtggccttcgtgcgatggaggtcgaggtggtcgtccgaggccagggtgaaggcgggcggtggcactgcgccttcgctcctgccgaccatcatctactggccggccaagatggagctcgccctcaagctctttcttgttatccttgcgaccgagctcgtcagcctgctcggcaagacagtgctcatcgacttcgtctgttccacgttgcttaagtgtgctctggctccttgcgctgactctgcaacgtcgctcgacccgacccgacctcaggccttcagtctcttccaggcggcggtccagggcccggcgctcaaggccaaccggacgctcaagcgcgagacgctcgaggccaagctcgagctcgaccgaacgagctcccaggacgagtttgcaaagtgggccaagctccggcgcaagctcgacaagctcgtcgtcgagctcgagaagtcgagtgcgcgctgctacggccgtcgcctcagcatcgtacattcagaggacggcgtaggctgacctctgtgctcctcgaatctcagacgccgctctctcgacgacaaagaccggctttgcgcgctcgctctcgtccgtcctttggtgtctgacgaccggcgcacagtttgtcctcgtctggtggtaccggtcctcggccgtcttctacctgcctaagggctacctgcccggcgtcgtcggctggtggttcagcctgccgtttgctccgaagggtgcgtttcccaaccggcgcgttagccgtctttgagctggaggcacgcgacggactttaccgctgatcaccccttgcctgccgcccgctcgcaggatccatctcgagcgcagcctggtcgatggtctgcaagcggactatcaagtcggttgtcacgctcggcaaggagctgttcggacccgcaccgccagctgcggccgctgccggacaaagtacgctttccccctccagcttttggatcagcacgtcgcgtccgcgtctgactgacccttgcccactgtctcagaccccttcatgcacgcgccttctccggcagcgccagcgccgtcttcgactgggttcaaagagaacacacccgccgctgcagtcggcggaggagctcaaacgttaccgtcgatgcggtcgagggcgacggcgcaggggacggccgatgagctgagagcggaggatctcgactaagggttgactcgcaaaagggagccgggccgttgacatgacctatgaatcgatctcctgtctgctgcacgatttgacgagggacaacagcgccgggtcaggggggacggacatgggtagacaagcgagatttcctgagggcaaacagggggggtggagcaacgggatgatctggaggagggtggagggggtaaagaagaagggatcggtacaaagtgacgcccgggagcaaggaagggggtggaggaggggggaagcaaagaaagctcggaatcgagcgcgaaaggggtgaggattaaaagggggccaagggcagggccgtcggcaaggccgtcaggtcgactggccagatgatgaagagggcggtcggccgagcgcgttgtctgctccggcggcggcacagagatatagggagcgcgggactgtgtgtgtgcagagctagacatggagcggtgacaggatcagagaggatggaagatgggggagacgagccgagccgaccggctggcgatcggagcagaggcaaggactggctggcagccctcagaggatgccagagtcgcgcagcgcgttttggaggatcgtctccttgacggcggcaaagacgagccggatctgtatgcgggccaagggaaagcaggccagtgtcagtcagacgtcgggctggtgaaggagcggcgctctgacagggcgagcgagaactaacgttgctcgtgtcggtcgcctgggtcaggtgcgggtagaccgacagcctcgcccggttcgtctgcgtaaagcgccacagaatgtactttgccgccttgttgatgtcgggcccgccagagtactctgggaagtagttttcgagcggcgtcttgggtagcttggccttgaagacgtcaatcttgttgagaaagaggatgacggacgtccggaggaaccagcgcgagttgatgaccgactcgaagaggacgagcgactcttgcatccggttctgagcgggaaaagcggtggacaagaaagttagccccgagcgaggtagagcgtgactggaaggaggcgacgtacctggccattctcttcgagcagcacctggtcgtactcactcagggcgacgcaatagatgatgctcgtcaccgcctcaaagcagtgctgtagaaggcaaaagtctgtcagcacgactcggatcaagagcaagacgctcaggggagggaaggctgcacgatccacttcttgcgttctgagcgctggccgccgacgtcaaacatgctggaggtgaaaaggaggtggtcaacaggccgccgcaggcaggaggtcagaggctgctcttccacgcactgtatgctgagctggcccatcgtgaagcgcgtctcgctgatgccggtcgtcttcgtccgcgctcgcaggacgtcattctcgtctgggatgtaatccggcgcgcctatccgctggatcgcgccgaagaagctgcacgccgcacgggaggggaaaggtcagcggcgagcttgttcatagcgggagacgaaggggggagagcgcactaggtggccgagtccatcaggtagaactcgctcgagtgcttgttaaggatgtcggcaatgacgggatcctgccagagcgactcgattgccttggcaatctcgggcgagaggacgagcgacgactctgcgtcgatgcggtagtcgagaatcttgtcggcgtacacctggcaggacgagaggaaggaggacgtctagtcagacgatgactggtccgtgcgggatgatcgaaagtcgctggggacaaacccggttggccggctcctccgggtctacgccaatcttgcgacatgccatgacgagcgcctgggccgagtcaacaagattcttgtacctggcggggacgggtcgaggttagtctttcgaagtccactggcaggcgcaaactgggcggaggaaggtcggagggggtagaggacgtccaagatcgctcccagaacgcaaaggcctggacgatcattcggaggcgtgcccgtcgcagacgtgctgtcatcgctgggcgagctccgtctaatgcgtggggcggatcccctcgcctcagtctgattgaatgcctagccccgcaggccaggctcactagcagagccagccgcatcgcgctccttgggaagtcaacgcaaagcatgccggtccgttccctgagcgcgtctgggccggcaagcgagcgggcgggatgcctcgacccgcgcgcgcccagccgaacaacgcaccctccggccaggccaaagccggacgcccgagacgcagcgagacgctggtctcatgcccttgacgcatgaccgccaaggatggcatcgcctcctgcagcgcgagtctggtctagcgagcagggtcaagccaggcagggcgacacactgcggacggcagcccggcccagctgctccggctcgccgccgagtcgctttgacgcccgggcggtgcctagttccggcgcgtgaaacccttcggcgggaggagagggaaagtcccgagtcgagaggtgcacgcacacaatcagccggaacatgaggagctcgtccttcgagtagccgttctggtggatgatcttcatctgcttgacaatcgtgctcttgcccgactcgcccgagcctgtgtgcgccaggagggtcagggtgtcagttaaagagggcagaggggtgacggggcggtgtgcgagaggcctgagggggaggcggaagggtccgtcgagcgagcgaggcggacgggcggtcggtgaggcaaccgccgttctttaagccgctctgctcaagctcctcattcagacggccagccgaccaaacgagcgcgaggcctggcgtcggccccatggcgctctcgtcgcccgcctcctcaaatcgccaactcgagcaacgccggctgccgacctccacgttcctccttccgccagctcgtcgcacacgagcggccggtcaggctgtaagacacctgatcgaacctttggccgggagcgagggcagaaggcggggctggatgggaaggaggggatcacaccagggataggacggggggtaggacggggagcagtagagacgaagtcgaaggggtcgaaagagagggatgtcgaagaggagcagacaaaatggcgggagggcatacagggtgagtcattgagggggctgtgtgtgtcagtacaagaagcggccgggttcgagagagagaggcgaggcgagagcggagcgcaagaaggaggggagccggggctagtcccaagtgtcccactcgcgctccttgcgcttccgctccttctccatctcctcccactcgccgtccgaaaagtcgtcgacattcaggtcgctcttcttcggccgcttcttctcgaccggcgccgccccgagcctctttggcgcgggcgcgatcgccgagaggagcggtgtccgggcgattgagcgccttgagaggccagagacgcgcgacttaagggcggccgaggagggcgaaggggtcgcgtgcgcgccgccgccgctggctaggtgggctgagccggtcggggtgccgacgatgaggtgcgcggtccggctgacgatcgcgttgagtttgatgccgcctgcagaaagagggaggcaagaggctggtcagcgacttcgtttggacgggacaagacttgtcacggaagggacgcaccgccaggcgtctcggacccgagccgtgagagcggccgagcggcgaggccaagcgccggcgggatggcgacgccgcctccgacgccgaccgagcccgccctgccgcggccgtccttgaacggcggcaggtggcgggggatcttgtacgacggtgtcgaggctgcgccgggcgtgccggcccgcgcgagcttcgcggacgaggtggcagccgaggcggcggcgacgtgcttgattggcgaggccgctttggcgggcgagcgcgcgactagggctggcgcaggggcctgccgggacggcagacagacagactcgtggtcaaaggggattggcagtgagaggaaccgagcgcgacactcacgacattctcgtcgccttcggtcgctttctcggccgcctcgtcctccgtgtccgacacgaccgccttgctcttgacctgccccttggcacccgccttcttccccttgccttttggaccagcgccggtgcgggcgcgcttcgcaggcgaccggccgtcggtcctttcggcgtcggtcgtctccccaggagcagcggcgaccgtcggctgggcctcaaggtcacgagacggttcggcagcctcctgcgccgccaagccggcaacgggcgccttggactttgacttggccgtcgaggcggcgcccttcagctgcttcccagccttcgaggcggcctttttggccggagccggcgggggcgacagtgacttcggccgcgcaggctcgggcgcgacctcaatctcgtccccgtcctcgtcatcgtcgtcgtcgctgatggcgacccgccgctttttcgtctgcgagatggacccagacttggccgccgcacgatccgagccgctgctgaccaaattcgactgggcccgcgtggcgagcgcggcgaccgggacgtcatcgtcctcgtcgttcaagtcgacgaccattgagcgcttcttgccgccgacaggagcagtcgagcggcgtgctgccagcggcggtggggacgagccctttggcgaaagcgatggtatgggcgtcaggtcgtccgagtccgactcgccagcgtcgttattcttcgagccgccgccggccgccgcaggagccggctccttgccgaccgagcctttgcccttgcccgagcgggccgacgacgtcgtctttggccgaggcgaagcaggccgcgaccgcggctccatccggatctcgtccgcctccgactcggtcgcgtctgggtcgacgccggcctgcttcggcgccgcctgcttcttcgaggccggcttctctggcgagggcttcgactgagcggcaggcgccgccgacggacagccagccgaccgaggggcggccttcgttcgctggcgcttgggcttgtcgccgacaaactcgttcattggcggcgcggcggcaggcgtcttaagcgaggacgacgccttcttggacgaggtcgcttcgcggccaggaggggcggctgccgccgaagccgagggcgtcacgctgttcggacgcgacatcagcaggtccatcgggtcgtccggggccgtcgtggcggcattggtcgctgctcgcggcaccgccttttcggccgggagcgaggcagcgctagccttcttagccaggatcgagagtgtcgacccatctttccgctttggcggcggtcgatccaccatcgtgacggctggcgacgatgagggcagcacgatgacctctttagccgcggccgcttgcttccgggcaacggccgagccgcccggcgcaacaatctcggcctcggactcgtctgagtcgctcaggtcggctcgcttcttgctcggccgcgtggcggtggtggtgggcgaccgtgaacgagagggcgaagccgatgctggtgcggctgagggcgcgcctggtttcgcagtctttgaccgcgtcggcgggatcggctgggcgtcggcgcccttcttcttcttcttggccgcctcgttcttctttgacaagtacgtgtggccggcgtcggtcgctctcctcggagcaggagcgatcgttgacgacaacggaccggcagagcccgcagcgacgagagctgacgtgctgcccgtggctgctgccggcgcagcggacggatctcgcccagcgtgaggcggctcgaccgcagggtcaaccgcagccggtgtcggcacagcagtggtgagccgcggcttcggcttcggtcgggccttcttgacgggctcgccattgctgttggtggccgcgaggctcgtgctgggtccggcgagcggctgggcaggagccacggatgcgggtcgagaagctggcgcgggcgtagagggagcagctcgaggagcatgggaggaaggagcgacgcgggatgtggaggttgcatcagggccagtcgcagctgtgagtggcctggccgagccagcggccgacgacgacgacgacgacgagacggacgcattcttgcgtctaaagttgggcagaggcaccttgccgctggcgttgagcggcacgggcgcgagcaggcccgtcccggccgcggacgagccagtgtggatcgacgagctgccatcgtgccgcgcccggcccgcgacggccccaatgcccccggccgacgcctcgaggacagacgaccgggtcgtgtcatacgaggtgtcgatcgtgcttgtcttgtcagcgtcgcacgagccgcgggcagtgattgctccgccaccggcctggacggggtgggtcggcgagaaggacttgatggtcgaggttgagcgatcggccgcgtcgccgtcgcctctagctgcggctgggtgcggtgcaacggcacgaggagagcgagatacgagtcagtacaggtcatcgacgaaggcagaggaggagaggtagagcgtacctagctccactggtcgtgacggaccttgtccgggaggctcggccggcgcgtcggcttccgccggcccacccgagctctgctcgaagcgcaggctgctgccgatcatcatccgaccgacggcggcggccgtcgcaggaacagcagtcggcgggaagggcatcctgtactcgccctgtgggccgtcccagcggtcgagcccttgttcgagctcgcgccgcaccgtgcttccggtcgactcccagccgggcgtgccgttcggagagcggatcgccggcgtgccgctgagctcggtcgtcggccgcgtgtccttcgggcgctgctgctgctgctggaaggcggccgacgaaggcgacgagtgtgtcgggccgacgagcgagggcgagtagacaatctcgggcgtcggtgggacgttggccgccgacggcgcggtcgacagctgcgaggtccgcatcgacaacgacggcggaggcagccgatgctgctggtgctggaggtagccgggctggtggcgggagagttgcggcttggacgcggtcagcacctgctcaaactcgcgctgctcgaggcggctgcggaggggggtgcattgggaggggaagggcgaggcgcggtggcgaacgcagcaggtaggggcgggcgagcggaaagctggtcaggacgctgtgtaggcgggcgagacgctactcggacgcacgtcggcatgcgggtcccaagctggatccgctgttggctgttgctttgctggcagagaacaggctgggtgggagattgtcgtcgaggaagggcgacaggagggagggcgggtgagcgagagcatgcacgcctcaagacgcgtcgcggggcgcagcgcgatgcagttaaccaggctcaatgcaatccaggaggggacagctcccggtcgcaccctcgcacctcgccctcgcctccctccctgtctttctgaccgcaccgaaccctctatctctcttctgccagcacaagctcgcacggaccgctgctctctcgccacttgtctaagaacacgtccgccggccgaggctccgatcgggacgcagctccttctgtccgtctcacacccttcccgagcccgcgactgctctcggtcatcagcgcagcgtccgcctcctcgccctctttcggaccaggcgcccttccgtcctcgacagcagaccatcacgcaccctcttccgggtgtcttgagaacgcggacgacgatccggaaccccctttgtgcaaccacgaacctcgagcagcggcctccaccaccccccttcttcgtccttgagaaggcccgcgcgtctcgtaactcccccccctcccccttccatctccactcccggcgaggccagcgaccatcacggaccctgcatgtcggcgcccttcctgcagcccagtactcgtccgctttccaaaccgcagccactgcacggcagcgagccgatggacgacgatgtggctgagggctcgtcgcgctcggctgcggccggtgacgtgcctggcctggccgatggcctgccggacggatctcgtcttgtccgaggcgacgacggcggcatgtacctggtgcgtcgctcgtgcttcgctttatcttgagagcgatcctcgcggctctagcaactgacgccatcgccttccctaccgatcctccagcgctgggagcctggcatgacgacgacgacgacgacccacacgacgaccaccgtcacccactttcctccgctccggcttcctctccctccagcgccgcccgtgccgaaccactcgctcgcgtcgacctcgtctttccacgtctcgctcccgtcccacctctcgctcatggccttcccgctcgccgacgtgccgacgccggccgaccttcaggtctttcctctgacggtcggcggccgcaaggtcctcttcaccgaggacgatccgcgaggcagctcggctgggtcggcagcggcgctcgatgaaaaggtccgcgagacctggcggcgcgagggcgagggcagtggctggcggagggttcgttccgttcgtgcggccggcgcgagcgacgagctggctccggctgctggcgctttctcgtcgtcgagcattgactgggacgggctcgagcgcgtcaacctcgggacggcactcggcgcgtatggccgccagccgatggtcgtgacgccgccgtcgccggcccaccgtttggcctcgcacaagggcaaggagcgggcagcagtcggtcaggactcgaccttcaatccgctcagcccaccgccgacggcaaattcgccgcagagccagctgcactatccgctccaagcgcagcgagcaggaggcgggagctcgccgccgagaaaacgagcgcgcgacgcctcagagcgcgacatggtggtcgatccgccgcaggccggctcggatagctccgccgggcagcagcagtcgagcttgacgacgacgaccgtcacccactcgcatccgccgcagtcggccagtcaggcccatcagccgacggtcgggtccggcgccgagctcgcgctcctccagtcgctgccttccctcctccgatcgttcgacgcgctcccgcccaagctcgccgaccattttctgatgcactgcctccgccggtcaacgctgccgaccctccagcgcgtgtcggcctttatctcgcccgcgctcaagttcgactttgtcgtccacttcccaccagagatctcgatcgcgatctttgcgttcgtcggccggtccggcctcgcgagtgccgcgcgcgtcagccgcaagtggaacgagatggtcgagtgtcagcggggcgtctgggtcgcccggctcaaggacgagggcctctggtgggggctcggcgccgaagaggaggaggaggagaaggtccgccggcgctgggaggtccgcgaccgaaggatttatcgccgcggggaatcgaaccccggcctagtgcaaattgccagatggcaagcaccaatgaataccacttcaccacaacgatttgatacacgtaattcaacactaaccatttatatccacaatgacctactgaccttatgccctttcacccgttttccagagatggcagcgttatgaaagacgcgatagatctgcacagtactttgctaatcttttcctcgcagagcagaaaaggtcccgccccatcgagctgctactgttgaccgcctcgcgcaaggaggacgcgacgcgcggtcatagtaggcttgcccagttcccgaccgccatagtcccgccaccggtgacatccaacaatcatcgtagccatcatcacaccgggcctttccctgcatcttgtccgactgcgtctttgttgtctaccccccttatggactcacagatgggcgcccaccttacctgtggttttaagttggcgctccgcatgactcaatacgtgcttcacaccttcctctcgtggcatacctcttgttgcatccatgacactggagctagactctcttagtcctacttggccgaaggtaggcgctacgtattgagggagtcaccagcccgtaacctctcttgtggcttcgcctgccgcaacagacctttccatgggtgtttgagcggcatacaaggctgcagggttctgcgcaacggagtctcgccaaaaatgcatgacctcctcggagtaggacttgccgggcatgactgccaacggcgatcggaccggacgtaagcagtgggcgagcagggacgcaggagcggcgaaggtgggacagatggaaggacaagatggtgtttgagagcagctgcagagccctttcacccgctcgacgccagcccgacgcctcgaataggtccgggacgcggcccaagctccgcctgacgctcacgacccctccgccttcctttcaaggaacacgagatcgtacgcaccgttccgcgtatacgagctgtcgacaagccgcctctgacgatggtgctcgcctggacagcacggatgacagccacggttgcgcttcaggaggcgatcgagaagtacctgttcgacgacgggcgccttgccacggcctaagtcaaactgggcctgtcggatgacagcattgtgacggctcgtcggatctggaaaaggccgggtcggccgcttgctgcccccaagcataaaactcccccgcccagttgtccctttcccaagtccccgctcgtcgacgccggcgctcgccctcgccgatcttccgccgctgatcacaggcaagcgtcagctcgcccccaccgccacttccttccgcccgaccaagcgtgtctcatcgtcagcactcggtctaggtttccaggcggcgtccgaacggcagcagccgaaacgttgcctttcggccgccgccatccatgccaactctgccaagcgctgatgacgctgcttcatgcaacggcgaagcggaccacaaagcgttcgatgacggaccgcccggccttggcagcgacgatagtggcggcggcggcgaagaggaggcggcggtccagaacaaggaaagcctgacgaaggagatggagagccggacaacctccttgacccggactacatttcgccgcctccgtcggtcaccggctcgacaaaagactgtgacgcgggcaaccagacccttaacgtgcccaatgtcgtagtcaatcaggtacaccaccttgccaccgcggctgttggccgggcaccggcggtcgcgctcgcacaccgacagggcttcgaggctcagctcttcgcgcccggtgcaactcccaatggccagctcgttgcgctccgtggccattctggtgcgctcggcgtcggtgatttctccgtcgttgctcggaggcgggccgacgtccaaatcgagtcccggctgctctggctacaagttcgtccctacactgcgatggctcttcgcccggctcccggtcggcagagactgacccattcgacaaagccaaagcagacgactttcgccgatgccgagtcagtctggcaagctgtcaccatcgttccgagtggatcgtcggccgagcgcttcgtgccttagatgcgcacctctgaggacggcacggcacactctttcagagcccggccctgtccataccggccgggctcacgacacgactgcgcgacatcaagaactaaacggcgggcgccttcgccgaattcatggtgattgggtgtgcgtgattagctgtcttgtctttttgaacctgcgattagcggcagcagactgacccctgtacctctgacttgctctggacaggataacgcgtcttccttctcgagctcaaggcatagtcagtcctcttcccgccctgtaaggtgtagactttgaagctcgctgactccagcgtcttagccggggtacgattcggcatgagccgccatgtcgtgctcgacgagctggtcacaatcaccaaggagccgcgcgctcgggccgtcggcggtcgccggatccgggttgacccgcctgccagcccgcaatcctcgaagtcgcccttgtatatcgtcgcccgcaaccagcagtcgatcaattgggctcccgaccgctcggtgttgttttacagcgtcaacgtgtgcatgtatcaagagagcagccgcttaaagggaaaagaatagactcgccatcgacctccatgtctttcctctgcgatatttatgaggaagattgagtcatggtcgaccccgcgacctgagtatttacctcgaccaccgctgatctttgaccctgccggcctgctgtgtccgacgcccttcacgcggtcttaaacgaagttgcaagaggcgaccgctctcggacctgctgtcagcatcattgcaatcgtttcgcaatcaagattccctggcaagcataataaacccacttcaacagggatggtatggtcttcgatagcagtgatccggaggcgcattgctgtagggatgagcatgcgttcaaaatacacgagcggagattcggcgcggcttctacaagcaacagcccgatcgtgctggcaagggacagctgtcggcttcatcgccatcttggtgcatcaaacgtaaagcgttttgcgtgaggtcgtcgcctgtctctttgtcccaatggttccacgcctcaaacagattgtgattgccttcgaaaacgctgctatctgcggcctcagcgcgttgttggcgttggcggcttcggaccgacgattcagagcccggtgactatcgtgaaaagcactggctcaacagccgaggcaatggcgtcggcggaggcgacaattcctggcgacgtccatgatttttatcatccgacagtctgaaggcggtttcgcaggcagtgctgaaagccgactactgctatggcttgacgccctggattagcttgtcgccttagactgtcactcgcgaaacggcagaaatcagcaaaaagagaacattagccccatgggggggtcgaacccccagccttcagatgaaaccctgttgttgcacagattgtggtaagagtctgacgctctaccgattgagctaacagggcacgttatatatcagcgcttacgtacaaatacatccagttttcacaaatcctttgacatcaatgtacctcatggctgcgcacacaactggctgtatgctgcgagggagtagcatctcacttcacccgctcttcctcccgatgaattcagtgtgcgcatagcatcccaagcagtgaggtttcgctgaccatcgattcaactctaagctaccagcacgctgacactctaggtctcgacatgtgcctgtccatacgtctaggagtgccgctgactatgaccggctgctcgtctcgagcctttacaacgcatacccgaccttaggcaagaaggacgacatcgatcttgacgtcatcaaggaggaccgccgccatcccggctcggcgccggccggctgcccactcgctcgcctcgctaatcaaccccaaagtgagccctctctgatgcccgagagaaggcagtatggctaccggcaagaagtcaagacgacttgctaggccaagcacccgcactggccaatgagcgtccggtcaaccagagccgctgacaaagcggcgaccggaagaagttgtccaacaacggcgacctcttacaacgttctgccaaccactgactttgtcatctcgtctcatgctcaaaatgtcgttttcacgctcggcgacgttgggcgacactgacagaagacgccgtgtattggcgactcaaagcgtctctccacgtcgtcagccgagtgaccggcggctctgtaccgttgccttgagccttagagaccgctgacggaactcattccggccacggctctgttgatctcatctcgcacgtcaacggcacaagctgtttgctctccgcctcgacaacgtcgcccacatccccgacgtcaccgtcaacatttctttagcgagggacggcacggagtgggctaactaaagtagggatcacgacgtgttacgagcggtgatcagaggagcagagaggtgggactgaagtttctatggaaggagaggagcggaaaggtaagaggaagaggagagaaaggttgagaattgccgatgcattccggccacgcgcagtggcctgcttccgccgctccctctgcgcctcgcgctgtgcttgtcgcaactctaacactctacccacagcacaaatcatgtcgctctgcactcatacgaccgttgttgagccgacgtccaaaacagcttcaccggcggaaccaggtttttgttcacctcgaccacggctttaaggccaagatatcgggcgggcaagctgacgggactggcgctcccctcgagtgctactctcatgattgacgctcagcgcacgcaagtattaagcgcagatcaagctcgactccagaggatcagagcgatcgtcatgcagcggagatcgtccaacgtccggtgaggcgtcctattcgtgttttgactgtactgcgcctttctccgcccctgctcgcctgcctcccccaggtcgtgagggtcggtgtcttctacagcttcagctgacactgactccccaatcaccaggcgcatctgctttccagacattgacactgcgatagccgcctgtcagtttgcccgagtgtgaaagggagccggcctgaaggtgcgtgcgccaatgcgacccacctacgagtctcctgcggaataatgcctggccgccatccagcccatcgcgcaggacgagaaaagagacagggccgactcagtctcaggactatttgtaaacgactcatgaatcccacctgtagaacgagacaggaggcagggccgactacggtggggataagctaatgcctaggctaagggggctgcgattagggggggggggcgaacgtacctcagtctcaaaattactccgtgaacgactgaagtataggaggggtagcgagcggacgtctagccaagaggagagagcgagaagagagagaaggaaagagtccggcggactctagggcgctgcgctcaggtggccgagggtggtcgccatttctaaccctaaaaccccccaggttcccgcgctgcccagcctgtgccggcgcagtaacaccttcaggacatcgagccctcgtgtgcctggatcaatagagagcgcttcgccccgcctgtatagcttcaaggcccagcgtgtctgcttcctcgaacgctttgaccctgacctcacgctcttctgtccggacaaggacctcgcacgtccctcgatggccgccctcctcggccttggagagggacgggccagctcgtttgtcagtatccgctccgacatctccctggacccggcagacaacgctttctcttgacgggctcgttggcggcgtccgcgccgccttcggccgttgcgtttgtcgcaccggcctccagtgccgccagtgttgaaattgcgacgagtgcggcgtggcgcacagagccagcggcggcagcaggcggctgcgcgcgcgctggcgagcgcctgcccatgcactcctgacgcgcggactgcatcggcattccgcctcttttctctctccctcttagcttttctccctccccctttccgtagagactttagtccacttcttggtgactgagtgttagggtgcaagtggcgaacaggggggaggctggagctctgacgggcaaggacgagtgatggggggaacaaagaggcaagcttgagattcaggtggcgactcgaggtctacaggggtttaagtaggctgaagtgtgatggcgaagaatcttctggaaggctgtgcctgagcaagtacaaccctcgtcttcgtcgcgcatcacaaactagactgccgcgcactgttcgtctgctagacgtatcggatgcgcatgaacgaatgaaggactcgaattggcccgcggacgcgcgtccagaagtggctgcttgactctttggtcctcacatggcaggtctgtcgaaacagcccgatcgcggagtggactgaaaagtcagcgagccattgttaggcgggcgacgttactgttgacagagtgacggcgtgttacgccgggcttgacacgtcgctgtcgcgcgtcgcgcgcgggcgcccggccttgctcctcccttgccacctttccttcaagccgctcgctacccctatcgaatacccatgcaagcctcattctaattgcagatcaagggtcgatcaggaaacgggctctcccagagagcggtttgaagggtgttcgatcatctcgtctctggtgtaggacgagacaggtggcagggccgactcagtttcaggtttaccccgtgaacgactcatggatcccacctgtaggacgagacaggaggcagggcggactacggtgggagtgagctactgtctaggctaagggggctgacactagggggggcgaacgtacttcagtctcaagactactccatgaacgactgaggtataggaggaggagcgagcgggcgtctagttaagaggagggaccgaaaagagagaggaggaaagatggagaccggcggactctgaggcgcggcgcccgggtgaccgctgagcggtcgccagccccgctcaggttcccgcgctgcccagccggcgccggcgcagcaacaccttcaacactcccccgcgaacctatgctccatcgccgcccggcgagacgcagcaggttgccgtatcgatggtgtgctggtgcagcgaggggcttcgtcaggctgtcggctggcatctggtccgtcgatacgtaggtgattttggaatggccgcgttggacgcgctgtcggatccaatggtagatgacgtcgatgtgtctcgtgcgcgggtggtgcagcgaattacacacgagcgcgttcacctttggttgtcgctgtgaagctcgagtacctcatcgtcctggctcgcgccgccaaccgggacggagccgtccatcctgatgccgagctccttgcagaggcccttgaaccatgacgcctccttgcctgtctctccgaaagccatgtattcggcctcggtgctgaatcgggcgatggtggcctacttgcgagactgccaggagaccgggctgccgccgagcgtaaggatgccccgtgaccgagctccggtcgccttggtcgggagcggcaacttatccggctttgactctgacatgctccatcgttcgagcagctcttcaccttgtgctcctggccgaccttgatgcgccgtcgggcccgatctcgttggactttccggccggtcatgtgagtgagctcgccgaggttcgtcatcttgtagaccgccgacagctgggcctcgaagcgccgccgggcggcgaggtctgagaaggcgagggtgagatcgtccacatagacacctaccagtgccagcccgtccgccccgttccggtggagggagcgagtggtcgagagccggcagggtcttgtccatcgccgttcatcaggtgcgtcctgcctgattccagccgtagatattgcctgtcaggcgggcaacgtcgtcctttcggcctggcacctcgaatccgtttttgctgagcgaaacatatctcctcctccatctcgccgtacaagaaggcagctgcgacgtccatactgtgcagctcgaggtcccaggcggccgagagggcaagcagaacgcgctcactcgtgcccttgacgaccagtgcgtaggtctcgccgtactcccaaggctgccgagtgaagccctgggccaccagcctcgccttgtacttgtcgattgacccgtccaagttgcgcttgaccttgtaaactcacttcgacccgacaaccttagcgcctggcggacgctcagccagctcaaaggtgcgtgcttcctctagcgaccgcatctccttctccatcgcctccttccagcactctgcgtggggcgaccttatggcctcagcgtaggtccgaggctcggtctccggtggtggaggcggcgacaacgggaagggcggcgaggcaggcggcacgggcggcagcaacgccatgttagcggccctctgttgggtcagcctagctggcagcctgcaattttgtgctgggttccgacatgctggttggagcgtctggttggcagcgtacgtcattgggtcatcgactgatgtcgtgctcggttggctggcggcaggtcaaccggtttcggcccaacgtttcgacctcgaagtcccttccgctcgacaggctctcggcctcgctctctgtctcatcctcggcgctttccctttcggtggatggcctttctgcatgcccgcaagcaccatgccttctcccgtgcgggcattgccccaggctccggggagcagccgggcagcatcgaccacgccacccgcctccggccgacggtcgccaggcgggcccaagttacgcgctgcccagtcggtgccggcgcagcaacaccttcaacatggtgagcgggcggtcgctaggacggacctgggctggaaccctaagagagcccgtggcgagcgcaaggcgtggcctcgcggcgatgcagagatcaccccctgcgccgtcagagggcgtcccctacgtcggcccgccttaacctctcaagatgagtatgaagaagacacggcatataggtaagcatggagcatggatgcaggaagcagactgaatcgttgaaaagaaagctagatatcgtggtcctcgtcggttgtgggagcctcaaagaggctggcgtgggacgtggcctgtagggcagcggccgcgcaccgagctacggctttcgttgcgagcgatatcttcgccggtcgtttttttttttttgcttttaccatgcaccctgacgtctgtctcgtccgggcgtcgggagtcgactggcttgaactgacttggcgtcgaacccgatggaggccaaggctgcgtgaccggtattcctcgccgttgtcattttcgcccgagttgaggcggaggtcgtcattgttgaccgctgcagctacggacccccgccaacgctaggcagtgcaggaggaggcgaacctaggcgagtagacacgggggtacgggtgcgatcgacgctcggaggggggcaaggtgatcgtgtgccaggcggcggttccatccccgttgggtgagcgcaggggtaggagtagggtccgaaacagcgcggcaggagagcagagagccactcagaggcaactcttaactcaacgatccagccgcggtcgaccgctttctgcaaataatttttaaccaactgggtggagcttgtgttccttttttaatgtttcgctgaagccggcggcggcagcggcggggtgcgagaggagagagggaggagcatgccgtcgagtgaaagagcgtcagctgaggtcgatggtcgtagtgcagcagaaaggaggagttcacctgacgacgtgttggacggcgcccgtgcaatgccgggcgcgccgccgtctttgtcatttcacgcgctcttgcgcgccaccgtctcaccccgtctgaggctcgttgtcgtcttctgcgtcctcatcagtcttcgccttttctgccttgaggctggcaaagtgagcagggtgactgccggccaggcgggcggcggatgtgattctggtttccaagtcaaagtcgctctcgagtaggatcgtgaccgccgatcgcccaccgccgccgcaccctgccggcagcccaacccgcgctagagtttgtcgacgtcaccatcggcgctcaagctgccgacgacgacgaggatacgactggccccgccggttcgtcgcgcccactgagccgatcggccccggctgccagcgctccctccagccccgttgccccttcttcgccgaccttgccctttctacacagctcgctcggatcggtcactcaacaccacttggctcctcgacaagctgtgcgtcacccttgatgactctttctgcggctctgctgtccacactgactcacgccctcttcgttctattcctttcctttcctattatgctcctaccctgtcgcagtcttctcgatatcgcccgccgcctcaggccgcagcgctcctggcgacgaagagtcgaacgaggatgattacgctgacctggacgaagccttcgtcgccgaactcgttggcaagcagaatgatgcaaagttcaacgcgaccgacgtcgaggtcaaggagtggggtgatgtcatgtagacggcgcaggccaagcccgacccacggtagacccttcatcaaagtgcctcagtccgcatcgcagagacctcgccaactgggttgtattcctgtatgctatcctgacggcccagcctcccacgaccgaccgcgaggctctcgactggatccgccgcgagggcatttcctccgtcgtctgccgggtcctgcgctgttctgatggcctgcagcttgaggtcctgagatggatccttcagctggacgcagccgtcgccacccgccccctcatttatgtcctcattgcgtggcactcgtatctgtccccgtccaaacccttaccgaatttcccaaacaacgcgccggaagagctcgcaagggtcgtcgaagccattcttattctcgatgccagcttcatcagtgaggaaacggcgcgcgcgagcgctgcccgctttgtgaagctgccaaagaagatcagctaggtctctaagtacttgcgctctctgcaaacatgcgcacctttcccttgagatcagctgatgataattgtctcgagctcgtaccgccggcgacgtcgagcttgatctggaacgagaaggccagtgagtcgacgttgtcgtcggtcttctcttcgatgtcgacgctgccttgactttcttcaaaaccgacgtcgagcccaaggctgcatcgccgagcttggtcgccagcttgtccatcgacgacgagaacgacaacgacggagcccgccgcttcttgctttgggttcagcctcgacgatctctctcagcgctggtaagggtttccgagtcgaccggaagggactgaggcggaggctcaagagcgtcgtggacgggggctttaactattaatggccggaccggacgctggcggagccgacggttggcctggacggcggcctgggcatcggtcgggttgagcgttgtcggccgcgacggaaatacggcggcatcgatcgcctgactctcgacaaggattaatatgattctcgacgaggattagcacctaggcgcttcgagggcgggcgacgacgacggcgctgcggaactctgagtcggcggagaatgagcggccggagcgcaggttgccgggaccatgtcctgcgtgcagctgcgagtcctcgcgggcatcagcttgtgggagcgggtgggagtgctggaggacaggatgagctcgacctcggtcttacccgcctagcactctgtccgggaggtcggctaagctgactttcgcatctcaccgtctgccatccgccattcaacgcattgggcactttgatcttttcatgacaggaagcccagaatatcatcttgctcctctcagactgacactacgattgagttcagaggaggctcaatgcgaggtcgtcaaagttggacgtggccgggaatttcgtcccgaccgcgagaaggggaagaaatcgggcgcgtgacaggcgagctgtgaacggcagtaatagactttgtccttctcgacacgggcgggcgaacagataaagaggcggtcagaagttcaaagcgagcttgcttggcttcctgtgcgagggatgtaatcgtgcagattatgagcagatgtggctttgaaatgaccttccgtaaagctgccgctaacttgcggcgacatgtcgcggattgatttgatccaaggaaggaagttcagaagctgcttcgttcgcttgttcaatatattgaagacatacggtagcgatgatttatggatgctgacttttcagtccactccgcgatcgggctgtttcgacagacctgccatgtgaggaccaaagagtcaagcagccacttctggacgcgcgtccgcgggccaattcgagtccttcattcgttcatgcgcatccgatacgtctagcagacgaacagtgcgcggcagtctagtttgtgatgcgcgacgaagacgagggttgtacttgctcccgacgctctgctctgacccagctttaaaccatgcccacagccggccacggccgccgcgcgtcgctcgggacgacagccacctcgccgtccacccgccgccgctcactcgacatgacgatggccaagatccaagaggcgctcgacggccgggacgatcgagccgatgtcgaggagatggccgagagactgagttctccgacccgcaagcgggtgagttctgatccgagacgtggcctcgagagagcagtcccactgacacgcgtactcctggcagtccaactcgagcccccggagcccgctgagcccgactcgcagcttcgcctgatctacgggccttgcgctcaggacatgctgtcctccttcacacgctcttgacgacatgttcaaagacgaaatgctttctgcccgacggtccccggccgaactctcgacctgcgccttctgcttcgcccgttccgcttcgcgacacacgcctccccttatgccaaccgattcctaacacgtctctcgttccgccctacgctatacgaccttctctccgtatttgacgactgcctcgacccaaaagttcgcatgtgccagctgccgactgctggcgaaggtcgtgacggcacgatcgtgagctgcgcgccagccaggtcgttgggctcgcgccgtctttggctcctcactaccatcccaccgacagctacagccagatacaatctagctttgcagcaaaccagcgtcatcctgcagacggcgtgtgtgaaggatgtcgaagaagactacatccaagtactcggtcgtcggctcgggcgccctctacgacctggcggccgagctcgaggcccagaaggagaagctccaccagcaggtcggctcgtcgacgagcaacaagggcctcaagcgggagtcaaaggtgcgtcacagcctcagcatcatgagcgcttcccagcagcgtcgcatcggcttcatccgagggtagagatcaaggagttaacgccgtcgtcccacttgctgctgcgggcgactcgagcagaagacgagccggtggcacgccccgaataagggcctctcctcccgcgtcaaacgccaagaagctcacgaggaggccgacaggcggctgggaaaggtcgacaaggcgacgctcgagacgagccaggccgcgctcgagcgcaaggcccggatctacgacgagctcaagcggggcggcaccggcggcttgagcgagcggcagctgagggaggcggcggttgacgtacgtcccgtcgccggcttgctctctgccgaatctcgtctgctgaattttctacgatgctgctcgtccgtccatgtccagtgggacaagaaggctgtcgaggacgactattcgtccgactcgtcgtttgaacactctgacgccgaggcgggtccgtccggctcgggccgacgcgtcgaggacgacgacccagagaccgagtacgaggacaatctcggtcggactcggacagttcgtcggtctcaagtcccggcctatgccctcgaggcgaagcggagggcaaagttgcgggccgagccggcgcccgagaacctcatctgtgcgtcttccccttcgaccgggctctgagctggccgctgatgcccatctgctttgcaaccttaagacggtgaccaccagtactaccccgtgtacgagccgagtcccgaggatctgcgggcgagatggaaggcggccgaaggcgagccggtcgagaagcactacgatggagcggccgagggtacgtcgccgcgggaggctagagacgcgtttctgctcgattcgagagggtcgctgacgctgacttacctctaccttaccagtccgcaatcgatcggctgccttctatcagttctcgaacgacgccgacgagcgcgcccgccagcagaccgagttggcaaaggcacgtgcagagacggaggcagcgcggcgcgacgtcgatgtgccggattccacctctgccgtggaaggcaagggcaaagaccgcgcagagcgtgtcccgccgccaccgccgccaccgaaacaatttggcggcaaggcgtcggaaaagcgcaaacgggagcttgacgagcggcgggcgatgctcgaggagcgcaagcggcgcaaggaggttgaggggtttctcaagcaggtcgaaggcgagcttgcgcgggatacaggcccgagtccgcccagcacgggctgatgcatgcgccgccttcaagagaagatgtgacgagcgcgagcagccgaccgccagccgatcgatctgaagcaaagactggcgagagcgaacaccggctacgctggctttgcatgcgcccggacaagcggccattctgccggacgaagcagcgcttctataaatcaggatccatcccctttggctcgctcaaagcgaaacgacgccccactgtgcgcggtaggccttcatcttctcgagctgctcggcgtactcgccgcccttcttctccatccaaagaatgatgtcgttgagtccgacgatcggcacgaccgggacgccgtactcctctgagagctccatgacggttgagttggtcgagttggcgccccgctcctggcggtcgacgaggatgatgcagccgacgagctgagccgacgacggcaggagcgcgattgcttcccggatggctttctgtagtcgtcaggatgcgagagacttgagggtcagtcatcaacggtctgggttgagcggaagcgaagccgccgtcggtcgctgctgcgcctgcgttgcgcgagctcgaccgagacgggccaacggccctgaagcagaagagcgtacgaaccccgctcgtgaggacgtcgtcaatcatgacgaccttgcggccctccatgctggcgccgaccatgttgccgccctcgccgtggtccttcttctccttccggttgtagcagtagtccttgtggcagctgtggcgctcactcagggcgaggcaggtgacggcggcgagcgggatgcccttgtacgccggaccaaagaggacgtcgaagttggtcgcgatcgaggacgagacgagcgacgacgcgtacgactgggcggtcgacgacagcagcgggccagagtagaggagaccagcgttaaagaagtagggcgattggctggaggggggcggcggagatggttgagacacgagtcagccgagtggctagagtatcgtcagcgacaggctgcccagcactatgcctggccttcggttggcctgggatggctcccttcgtcatgcgttgaaggtgacaccgtcagaggcaaaaggggaggggacgaaccggccgctcttgagcgtgaagtcgccaaagatgagggccttggcctcaagcgcctgctcgatccagtcggccttgaactgcgggaggtcgtcagaagcggcgggagacatggcggcaagcaaagagggcgagacgggggattgaggtcgggtagaggtgaggtcgtcgaaaggagccgccgccgccgcgtcggtcgctctcgcccgaggagcccgctggcctggccgacttgcacttgcacccccatatcacgcgtacgttcggggtctgatcacatgcggtcgttcgatcgagaagcaacaggcatagattaaggtacaaggaaaggctggctgtcgatgaaagttacaaagaggggagactacgagggtggggcgcgagggctcctgcatgtctgtccgccgccgcctcgatgtctggcgcaagagggcggcgagcagacctcgtcagccattgacggtgacggacggcttcttgcgatgctcagaagaagcgcaagtagtcaaacacaaagttaggcgaaagccaccagtccgaggcggccgagccactcgcgacggaaattgtcaaggtgttctcgcccgccttgagcgtcgaggcggcgactgggaagatgaaggcttggttgcgtccgcgccaagagcctggtcagacgagcagtggaatctgcgttagtctcggtcgcaagcgctcgagaagcatcgctggattggcgcacctcgagaaacgccgcgcgagtcaatcttgatgggggcgtctgggaccgctcctgcaacgccgttgacggccacggtcggtctaccacctgcaaaactggaggtaattcccacctcaactgtcgaggccttgacctgggcggccgtcagggtgtacttgatcgtgagcggctgattctggccctgccagagcgccatggggaaagacgacaccggtgacgagccctggtaccgagcaacaaggcagggtcagcctcggccgtcaaagttcggaggacgcgtggcagactgaccgccgtgagagtcagctttggccagttgccgatcgtcgggtgcgtccgctcgatcttgtcggcaaagtagaagccgcgcggcgttccgtcacgctcgccgaacgaccagatcggcgtgatagcagcctcagacgaggcaatgttctgcgtcttggtcgaacctgcggtaacggtgacggaagaaacggtgccgaccgccatctcggactgtcggtgatgaagaattcagtgctgcgcatggttcgaggagagaatgtcggcgcaccttgtaaagcgtttgcgtgtaggttccggggatcatcagcggcgaggtaaacctgccgctcgagtcggccctgacccagtactgctgagcggctgaggaccagccgacgacctgctgccccgcgtaggaggcgccgataccgctagctgtgccagagatgcggccacgctgagccgccgagaagtagccggtgataccgagcccgtcgaaaaaggatgtgtctgaggagcaggctccggtcagctgattcgagcggtgtcgcgacggcgggcgagatggggcgtaccgaggtcgcttgaaggcgtcgagccggtgttgatgactagcgcgtaagggccagactgttgaaccaatcaaagcggagagtgtcagcaaaggccggcttgtgagatgaaggagagtgtggacgaacgaggcccggccggctagctgaggatgggacaaaagccggcaatcagcgccacccagcgagtcacttggacggcatgtcaaacgcaccctcggtctgcatgtgaccgctaaacatgtagaaatacacctgctggtcagcagctccttggttgtcgatgtcgctaaaggggcagaggggggagggtgtgaatcaacgattgccgcatttgtcgtcagtctggcacgccgacgtaccggaagaacggcccaccgctcgagtgctcgtacgcggttccgggaaggaccatccaggcgccgaccccgttgccagtgactccatggacctggtcgtcgatgaactgcttgctgctgaagaacttggtgcggatcgagccgtcggcgcacttgaagacgtcgctgccttcgacgacggtgtcgcagccgcggacgtcactcgccgtcgttccgcggtcgacgctggcccggttgagccggtagatgaagcggagctcgccaaccgtcgggatggcggtcgcgtgcgtggccatgtagactgagggtcgagaagggccgcgagtcagcagggcccaacagggggcaatggcaaggtctcagactcgggggacagactggtcgcatctcccttcttggcgacgaaatacctttgggtgcgagaggaggcgtcagctgctgctgcggagggtcgatcaagtaagagggctgagctgcttggccacgcactgagtaatggtaccgccgatcacactgctctgcgatgtgacgacaatgtactggtcgttgaccgtccgataggtaacggtcgcagtgccgaagccggaggcgatgtgagagaactggagcgcgaaaggtacggctgtcagaagcatgatgaacaagaagggggctgcggctcgggatgcagggccgaaccttggcttggtcctggagctccttgccggcgtagacgatcgaccgaatgtcgccgttgcccgtatggacctggataaaacagacggccgctcgaattagcaatggatttgtgagagacccccggctgttgttgtgggctgaggtcacaccttgaagacgaggccgcctccggtgtcgaccgacagcagcgagcccgagatgctggttcctgagcgcacagagcaggatgaaatgatgagtaggtgctttgggatgggtaggtgacgcgttggcgatgacaaaccgaaggcggcgagggtcggggagagaacggcgagagcgccgatgaggcaggcgaagagctgctgccggaggagcatcctgggggcaatggaggctagacgaggtgagaagcaggggcggtcgctgggggaggagggagggagatgcggagggaagggacgaggcgacgacgacctcgaacggccgcagattcggacaagacatgcgcgcagcagcagcgagcctgacgacaacgacgtcgaccgccgtccaaaggtagtcagtcggtcgcctgtccgtcgcattttgcctgatcttgctgtcgctgagatgataaaagggagtaggataggacgacatagataggaatagggaacgcgcgggcggaacgggcctcggacgggagaggagataagtaagggttttgcgaggagcacgaccgagggctcgaccgacgaaggacgaaaagaggagatggaggccctaccggagcgagcagacgtcgctaactgtgctgccgccccaccagaggccgccaaagatggcgaccatgagcgcctggccggcggccatgctgccgaggacgtaacaccaccgccagcggttcgattgccaaacggcccgggcctcaaagacgagcgcggcgaggttcgtcatcgtcccggcaaatccgatcgacagcgagtggagagcctgagagggagggagaacggggcggctcagacattgagcagcagaagcaaagggagcagggacgagacgtaccgcacactggacggtcgtcacactcgtcttgaggtcgagccgcatgaggatgaagcacgccgcaaggacggcggtgccgagcaggttggcgataagagtcccgagcgggaccccgttggcgcgcccgagcggctcgcgaacagcgttcagccgcgcgaggtagtagcggacgacggcgccgccgggagcgaggatcatggggaagacgagtgcgtgacgccagtagggcgtgccgccgctgaagaacgaatacgagatgatggcaacgacgtaggaggcgaccgacagggcgatcgtgaaaatgtcggcgcgcggcgtcggcgagagccgcgagggcgatgtccgccaggcgtctgggagcgagggcacaaagcgggcgcagtagagaccgaatgacatggcgccctgcacgacgacgagcgtaattgccagctggctgaagccatcgagaatctgacagtgggaacaagtcagtcggcgctcacagaagcgacaagggcggcaaggcgcacattctggaacgtcccccggttgtagttgttaaagttggcaaatgcgatgaaggcctgcagcatccagcccgagaagctgttgattgatccggcgaagcctgcgagagggagggggcgatcggatgagcctccgggaggtggcggcaatcagagattgtcataacgaaggacgcaccgacagagaggccggtccagatcggagggtagctgtcagcaaggggagggtcagcaacagccgtcgccctcgagtgtgggagaccagtgcgcacagagtgttgaggtcctcgcgcttgcccaggacgaggccgaagatggcggctgagacgccctgcgaccaaagcaaggcgctgatgctaccgccgtcaaagtcaaaaacgttattgaggccgaatcgctgcgggaagggagaatgtcagcgctcagtccgagaagggcatgcagcaagcgcgacgcacaacgagaacaccgaggattgcataggggaagatgatgcacaagtgcgcaagccggcgggtgagcgtcaagtcctcaaacgcgatgaactcgtcgtcgccgccgaagagcgagttgcccatctggcgctcctcttcggcggccgacaggacgctcccggcggggctgctctccttctggatcagggtcggctcggtctggaaggcctgctggtcggtgtacttgaggatcgagacggtccgcgtgttgcgctgactggacggagcgaccgaggcgcgtttgactgggcccagctgctcctcgtacttgaagagctcggtcgcgtcgcgcgaaatgccgtcgtctggcagcagatccttttgcgactcggcaacggagcgcgcgcggagagacgagccgctgtactcgcggcggaccgcccgaggctgtaacgcatcgctcggcgagaggtagctcgacgtcggccgcgtcgccgaaattggcgtcgacgggccgagtccgaacgccgagtcgagcggcgacgaaccctcgccgtctacgtcagagtagagtgacgtctcccgcccgtcgccgccgccaccgcgtttgagcgagatggcggccgagagccggttctcgttgtgcgatgcgccgtcagagttgagagcgtcgaggactgggtagctgggcgcctgcgagacgccctgcggcgagcgggcgctccggtctgcgatgctgccgctctcggaggcggtcccgtcgatcgagttctcggcgataagcgagtcgatgttgcactcgagcgtcgtccgccggccctgctcgtcaatctcgtgctgcgacggaggcacgcccaggctgtcccgcaccggcatcgttggcaccggcgggacgtcggcaccagaggcgacaaacttagtcggcttcttggccgagcggcgcgacatgcgctgctcctgacgctgcatgagcgcctcgaccttctgctcctccttacgctggcgcatcttgacgcgatgctcgtcggcccggcggaagcgctcggccgcagcctcgtccgggtccataaagggcttgttggcccgcatcggcggcggcatcaccggcggcgggaggtcggtcaacggcggctcaaacgacggcgttgggtagaagcgggcgggagcaggcggcatgtcgtcgatgtcgtcgtagtcggacggcgaatcgtctgaacggggctgggtctcgcgcgagaggtcgagcggctggtcgtgctcggggggctgagccgaggacgagtagaggatccggccgggagcgatctcgtcgccggcttgagcgtggacgggtgcgacggccagcggcgcacgagcagggggtgaccgcgggttggacgagtcggatcctcgcctgaaccagctgggcttggaggggctcgagagaggggcggtcgctgtcgtcgttggcggtgtcgtgtcggtcgagtagtttcgcatgtaagctccccactgggaggacggcctccggtcggcagctgcagggtccgacatgaccagtctgaggcagacgggaaggcaaaagggacgacgacgaaggtcagacaggggcggttcaaaggttcgtcgccgagccgacggctcctgccaggagccgcgacaccagccgttctgagccgacgcaccagaagggaaaaggacgacgaggggcgagggagaggaggtggtcgttccaagactgagagcgctcatcccctcttcttcgcccactcccctactgtgcgagcgtgccggccgtcctcccttccgccgacggtcgagctacgacacggtcagccaacgcgcgcccgacgacaacgctcgtcggaatccggccgtcgagacagggcctggaccgagaaacgccacgtgcgtcacgcgcgactcaaacaaagagctcggcgcgtcggcacctgtctgcagcgactcaagacaggtcgcccgctggcatcgcagcgagatgagtcgctcgagccggaccgacagcaatagggaagaagcaacagaggagaaggaagaggacaggatgaaaggcagaggcaaggtggtcgtcgccggtcgtgtatgcggtgcgagaagggcaacgtagaagcaggcatagaggtcgtgacagtagggagtggtcggatatgatcgtgagaggcaggttgggggcgagtgcgcccctgcgagaaccagtgcgcatagagaggatcggccgagggtgggactgcgcggagtgccaccgggtcgaggtaagcgactcagcaatgaaggcgcagacggcgaccaacgcgcgaaggtgtaacatgtcgttgagtaaaactaggcgtcaggaactcgatccggtaaggaagaggttctcgtggaagacaccgccggcgacgacgtctgggatgccgtcgtcgccctgcagacgggcctgctccgactctcgccgtgaccagaaggccttggcgcggtcgagaaggctgagagggggaagcaaaaggaatcagtcagcgcagggtcactcacaagaggagaaagcgcgacgcacacgccggatgcgatgaagacattgtagtcaaggtgcttgagcatctcgcgctccattgagttgatctcgccctgcggccacgggcaccggcggaggaaggccgagttggcgtacgacacgtccgagatgattttgaccgcgaggaggtatgccgagaagataacgcgaagcttggtgtcctggacgcctgccgaaggaagggtggagcagcggcagttgggggtcagactgagagcaactagtgacgccgaccggtagacagacctcccgtcgccgtcatggtcggatggagactcttgaggcgctcgagaaggatgacgagaccgatcagaatgcaaagctagagaggggttcgaggaaaacagaaagcgtttgacatcagcgacgatccgctcttactcgcagcgcccagtcgcgaccagccgcaccgggtgcgggctcaggctcgtccagtagtagaggtagcgcttgaggagcgagtcctcgccctgcttctcctcgaggcagggccgccgcgagcctggtccgagcgggatgaggttggcaatgaggtcgatggccatctctggttgcacatagcagggtcgcacgcagcaggcgcccgtcggtcagcaccaaacctggaacgtcgtatgaaagcgagcgcactcacgacagtcggcagcgttcgtccccagcgacatgacggcgtacatgacctcgcgatcttcgatcggcaggctgcgcgtgccaacgccctcaaacagcatctcgcgctcctcgggctcgagcggcggcgaggccggtaaggggccccttgcgagcttggccgcctgagcagcagccctcagcgtcggaggatcggctgtcggccggtagaagatcccctcgggcggcggaaggcctgagacggcaggaagcgcatacgttcgccgtcccggcggtggtcgcgcccgctcgtgactgggcggcgtcggcagcgcgacaaggccaaacatggcatgcggataaatgccagtcgtggacgaggacggcgagaggggcgacggcgggcactcgccccctgagcacgcggccggctggcgggcgtgtgattcgagcggcgtggtcgggttgacgcggccggcgtcggcggctgcgagctggcgcgagcgttgtctgtgcagtagttgagtgggcagccagcgacgaggaggcaggcgtcctagcttgcgtgagggtcgacgtcgaggtggtgggtgtgatgggcgggatggcagctcgcgaaggagagcttctaaccatttaacttcgatctggaccgacatgtgccgcgtcgaagactccgcgccggaactgacttccggttgactgcgcctcctgctcttcctcccttctgcgcgctctcttgctgtcggtcgctcatgcatgcagccatggccatcacctacccagcgaaatcccctcttcaccacttcacgcgaagccggcttagatttcgtcggggtagagctgcagcagagcggggcagacgacgcgtcagcaagcgcagagggcgaggaggcgctcagaaagattcaggacgtaccatgactgcagacggcggcaatgagaagggcgcgcaaggaaggtacggtccaaggtcagtgtggcgctcgcgagacgacgcggtgacgaaagacggcaggactcacgctcggggcggaccttggcgtcaaactcctcgggggtgaggaggccgagcgagacggtcgcctccttgagcgtcgtgccctccttgtgggccttcttggcgcacttggcgacgtctgctcgggcaaagagggcgctcgtcagtcgtctgcacgcgaagacaggagcagcaagtgggggggacagactgtcgtagccgaggtgcgagttgaggatcgtggcgagcatgagcgactcgttgaggagcgtctcgatccgcttctcgttggcctcgatgccgacgacgcagttcttggtgaacgagcgcgcgccgtcgccgagcaggcggatcgactggagcaggttcttgatgagaaccggcttgaagacgttgagctggaggcgggcgggcgaaatcggccttagttgcagacgaggtcaacaggagtgcatgctgaccgttagggaggacggttgtggcatgtcttccctcacgaaggtcagctcggcacgtgctgctcgactcgaggcgcgaacttcgcagcagcaagcactagctgtcgacaaaggattcattgcctctcgacgaggcggcccatcgaccgacgatcaggactaggtgaaggcgggcattgatagaacagaagcagtagagctgactagaggttggagacgcgagcgatacaggagaaccggacgaggccgccgggagatgcgctacacgaggagaggacgacgcagacgtatgtcaaggaagagaagaggagcagagggaccctagaaggaacggaagtcctgaggagtgccgatgacgagcttgggtgccgagtcggagcgtttggtccggggcatcgggatgcgcgaaaaggacgacatgctggctgacgacttgtggcctttggcggcagcggacgacttggtcgaccggaagccaaagtgcggcgacaaagggaggggcgccgtcggaggagccgtggccgggatcgacgtcggcgaaggcgggaaggcggcgatgagctcgcggacagcggttgggtcctcgtcgtcctcgtcgtcggatgaggcgtcctcgtcgaaccactggcgaccaacgccgccgccgaatttggcgtcctgctggtcctgctgctcgcgggcctcgtcttcggatgagctcgaggaggttgacgagcgcgacgaccggatgagggccggagggaggagcgacgggggtgcctcgaccttagccggcgcagaaggaggagggagggagtcgccctggatgacacgtcggatgtcgagaacgagtgcccggagctcgcggcactcctcctggagcttggcgttgtcgcgagtgagaacgtcgaccttctcgcggctctcgtcgagcgcggatgagagcgcaagcttctcggccgagtgctgggccttgagcgccgagaggatcttggtccgccgatgtctgtgccgccgctcggtccgggacgccgtctgactgcccccggcctcaacctctttatggtggtggtcgtcgtcgttcgacgacttggccgaagagaaggatgaccgcgaggacgcgccttccgagtacgagtcgaagagggacgaggtcgacgaggcgtcggacgagtgcgagttgaaggacgaggccgacagcttgcgcgaggccggccgcgaggcggtagcatcctgctcgaggaccgacggcagcgtagttgcctgatcctggacgaccgacgaggccttctgagggactatagggtggagaacaaattgaggatagtcagcgccggtcgcgcagtgaatcgacgaggacgagagacgcacgtctcatgatgacggtctcggttccgtcggcggcgacctggatgacctcgccgcgctcgttgatgcgcttgccgccgtaccagcctggaccgcccttgcccttgacgggggcctcgctctggccctttgcggccggcggcggaggcggaatccaagaagcgtcctcggcctcggcagcagcctcctcgtcgtcgacctcgcggacgtcggcctcaggcaggagaaggttggtaaggtcactcgttgtactcgtcgttgagggcgcgagcgagaccgtcgagtgcgaaggcaggttgaacggcagcgagaaggcccgctttgtccgttcaggctcggccatcggcggcggggctggtgtcgcgcgcgagagcgagaagcgcgagcggagcgaccgcttctggtgcgagatgacgagcggcagcgtgggtgggaggctcaaggtctctttggaggcggccgactgggatagcattgcgagcgaggtgatggacggccggcgggcgacgctgacgagcgtgtcggtgctccgcatgccggcgagcgaaggcgagaaggcagcggccgtggtagcggtgtgcgtcgacggcgaagcagccggcagcttgggcgaggccatagtcgagatcggtcggaggtacggtgctcggggtggcgacgatgggctttcgatgacggcgccgaggacaaacgaggccgagaagaggtcctcgtgctcgatcaccgggaggaacgagtgcgtcgtctggccagacgcgaccgaggacgagattgaatttgagcgcgtgatgggatgggagcgagcctcggagaagggcgacatggcgaatggcaggaagcgatcggctgcagcaagggaggaacgagagattggtgagcgaggagggcaagcgagcacctctgagggagagacggacctggaatgcttgcaatagaggcagtgagttgagagccgtgagatgaggcggcagcgttcggtagtggcgaaagggagctggctgacgggttggtggagcgacagggtgggtggtggacgagaagagaggtgtcggcctggcgtcttcttactcggccagctcttgaggccaggcgacgggtgcatcttctgctggcctctgcagcgaggggcgccgagcgagagagaggattgctccgagccgctctcgactgctccgagctgacatccgtggaagcagacaccgccgtctcctgctagcgcaggcgagagtccagcgctggtcgccgtcggagggaagggcgtgggctgaaccccacccgacgccacgtgcgcgcccagccgaccggaaccgccggcaattccagccgccaaatgcccttgacggccgcctcgccacgagcgcccaaccagcttcgatgtggctccaacatgagagagcacgactagccagccacctctagaacgccagcagcagacggcggtggtggtggcaacaggggagacgatgggatcgaggcaagggcgagctcggcggtcgtcctcggccaacttgcagatgcgagccgcaacggctgactcgctcgcgctgagacctccgaccgaacagcgacagctgtcggctcgcctcacaccctccgcgctacctgccgacggtcgaagcctggcgacaggaggcacgactaccggccggagtttcgactcgagcgttcactgccagtcggtcggctcgcacaagggcatagcgctaaacgccctgcctgctgcagcgccgccttcctgcagcgccgccctcctgcgacaactcatcgcctgcactgctgaccgtgcctggactgcctcgctgatggctgaccggacggtagcagctcatgttcatgcatagatgatgagggtgcgaggtcgtgtcatataagggcgtcggctgaatacaatgggcggttgcaacgacgacggggcgtacaatggggagaggtcgtgaattaggcaaggagagactcaaaccggcgggcgatactactcgacggtggccggagcctcggcaaagacctcttcgagcgcggccgccatccgccggacaccctcctccatgtcgacctcgctcgtaaagctgaagctcgcccggaagcggacctcgtcaggccggagcgggaggctgtcgttcgtccggaagaccgagcatggcgtgaagatgatctggtgggcgatgaaggcgctgaagaggcgctcgagcgcgtcggccggcgccagatgcggtagccgcttggtctggacgcgaaggaagactaggcagcgagggagggtcggataatagcgtcaatcgttgggagccgagactgtatagacttcggaaggactgacagaacatgccggccgtcggccgctcatactcaatcatgccgggggcgatgatggtcgagagcaggctgtccatcctagtcgcccgcttcgagtactgaggttagagagcaggcggccgacagtcagtacgatggttaaggaaagagaccaagaggaggaggacggaccctttccgcaacgcctgagaggtagtcctcgaagccgagctggccgccgggcattgcgccgaggaaggccgtcatggccgcgagcgagaagcccgagaccgactggatcgtcacctcgttccggcgtgagagctgggtgattaaggccgaaggggcgacgagccagccgagtcggcatccgggcgagcagcacttggagaaggacgagagctcaatcacacgcttgtcggtgtcgagctcaaggaaagacgtcggtcggccggccggcaccgcgccgccgtatgtcagctgcagggctcggtaggggtcgtcacagatgatgatctgcatggagggcaaggtggatgtcagcaggtggacaaaggcggagggcgatgacctcagtcggacggacgatgttgtgcttgcgggcgactgcgtaaatgtcgcgtcggcgcagctccgacatggtcgcccccgttggattctgaccggtcgggacgatgaccatcgcccttggccgagagtggccgccgcgctcggcgtcgttccaggtgcgcagaacgcggtccatctcggccgggacaacgccctcggcgtccatggcgagaccgacagggaggacgccctgcggccgcatcatcgcgagcgttgccgggtagcagaactcttcgacgaggatggccgagccgcgattgcagagcatccggaccgtgttgtcgaggccgtcggtgttgccgttcgtcaggatgagatcccagtcgtcgtgcgcgacgccgccgttccggaggaggtggtgcttgaggaaggtccggacctggatcgggcccatgctgccgccgtattgaagcgcgctgctcaggtcgagctccatctcggcattctcgcgggcgtagtgcgtcgggtagacggtgtcgggcagcgtcgtccgcagcggcgtgttgattgagcggatcgtgctcttgaggtaggggaatgagagggtcattgacgagatgggaaacgacaacctacgagggagaacggacgatggtcagcgtctgcgagagccttgtcagacgacaggtggacacacgggtctggtaagccgccgccaaagttgatcatgccgggcaggccgaggtacctggaaggaagggacaactcgttagcagaaggtccttcaggtcgtaatctgagcacgagacgcaccgcatggcgaggtccttcagcgggctcggatagcgcgagcgagactcttcgctgaggaaagcatcaaagtcgacaatctctgaccgaccggcatcgagcacggcagcggccttgacgagagcgaccggcgtgcgaggcctcgacgacggcttgtgctcagtgtgctgcgggtggtttttggtgaagctgtccatcaagggcgagccgcttgatgacgcgggagagaggatggagatcggcatcttgaggaggatggacagatgcggagagatgcttgagagatgaagcaggcaggtaggttgggagggaaggagaggacgaggtgggagagacgcaggcaggaggggccaagatagcgcgctctcttcaaggggtcagcagggcaaggtccgtcagcgtgaggttgctcgtcgtcgtcggggacgagcgaggcgcgtgttcacgcttgcgctacacgaccggcggcagcgccggccagccgtcgctgcggccgagtgggcgacgctggcccgataagcttctgtccaaacagcaggctcgctcgataacggcaagattacggctcgtgccgtggttgggcgatgtcagcagcagcagaacgacggctggcggtcagctctcaggtagcgtgcagggatggatgagagcagctcatgaggacggcaggcgatgtactgctcgacggcggcggcggcgggcaacggttgtcaaagatgggcgcggtagacgagacgcgctcgacggtcctcgcgcggccaaaagaggacgatagaaggctgtcgatcgaacgaggagatggcgcgcatgcctgctggctcggtctctgacacaagtctcgagtcttgttgggctgcctcggcgagcgccctccggctgggctcgtcctgagctgcaaggcaggggcgagcctctccctctccgcctattccccacctcatcccgttgctcgaagatcacgagctgatgcaccgggtcttgctcgtatctctctccaggctcgaggagtgggcgacgattgaggccaagcggcggctcaaggagcgcggcgagtaccctgtctacgtacgtcccttttcctcctgagatccagggaagagacgccgaccttccttgtccacccggccgttcttctcttgcaggaacgctcgatgccggccggcgtcaacttcaacccgccgtggaagggcatgctcggcgtcctcccgaccgacgaggagcttgccaagtagggcgctttactacgactctgggctggattggcctcagtcggaggctcgaggcggcgaggctccttcttttgcggagaatattctgccggcggcgaggagtgggaaagcctgtacattggatgtcatccgttccgaccgtaatcgtcagaggtgctcctcggtccttctgtgtccgagaccgcggggcgaccactgcgaccgtcgccctcgcccagaacgcagccctcatcctaataacgttctcaactttgccagtcacctgctctcacgagcgctcgtctctcgcgaaccagcgagtctcatgtgtgtcaacagccgcatgccctcctcaacctcccctttgccccctcctcgcccacgtccaccttccggcccgccgctgccgccgccgcagccagcgctgacgcctggccctcctcggccgccgcctcgcgctcgcggagctcgtagacggcccgggccagatgttcgaagatggtcgagacgccgtcgcccgtcttggcggagacggaggggaagaaagcagggccgtccggggcgctcacgaaggggtgcgtggcgacgggtggggtcgctgcctcttcgcttgccctcgccaaagatttccctgaccgactgccttgcaggtcgcgcgctggcggcggtcggacagtcgtctctgacgagcccgtctcggccgacgtcgcgctgacgaccgacaatctcgaggccgtcgacgcggtcgagtttgagcgttcatgcgctggtcgacggccgctgcggctgacatcagcgtcccctgcgtcgaagccgtcgttcgagctccagcccgaggaggaggccgagcccggcccgtggtcgtgcgagtcctcgtcgatcgggaacgtcgctcttggcaacgacgagggtagaccgctgcccgaggagctcccgacgaccgtcagtgagctccgggccgtcttaaagctcgcgagcgacgccgagctcgccgctggcgggagatggaagccgcctcttgcgactgtcgaaggcagcggggcgaggccttccgacgccttcgttgaaggaggcggagggccgatcggcggccgttcgcccagagcggtccggacggccgacgcaaacgcctcggtcggcgcttggtaggccgcttcgtgtgcgtgatgcgcgccggcgagaatcgtgccgttcgcgccgatctgcggcttgacgggcggcggcgcggaggagacagagatggaggttgtcgggggcggggatgtcggagaggctggtcggtcggtgctcgagcctgttgaggagacagaggggtcggtcgacgggccaagaggcgctggcgggggccgcgcctctgcgatggcaggcgggaggagtgtctcccagaacgccctggcgtctgcctcgcttacggcgccgtcctcgtcatcctcgagcgaggcgccgttggtcgagtgaacgaggtcggccttgtttccgacgacagcgacagggaacgaccgctcctcgcccggccggactggacaccgctcgctgaagacaatccaccagcgctcgagcgccctgagcgaccgcctcgagcgaccgtcgtagacaaatacgacggcgtcggccccgcggaaaaaggcggtcgagagcgaggcgtagcgctcctggccggccgtgtcccagacggcgagccggaccgagatggtcgtcgaaggcggtgaaggacagccgacgtcggccggattagcaggccctgaggctgctgccgctgttgctggattagcagcgcgcccgagctcgagggctttgacgacgtagtcgcagcctatcgtagccttgtagccgtcgtggaaggcttggcccaggtagcgttgccggagggctgtcttgccgacgcttcgaagcgacaacagaggaggaagtaggtcagctcccatcctgatcgctccggtagctctcgcccttccttcctgggctaagcgagagagaatagaaggctcctcgagtggggacggacccagagtcgccgacgaggacgagcttgacctgatgcgatgccacggccgcctgctgctgttgctgctgcgatgggagcgcgaccgcaggcgggacgacccctggctggttggccgtcaacggcggcaagggcgggtcgtcccaggttggcgtctttggcgacgccggcgacgagccgtactcgcaggcgtgagcggatggcgtgttgacctgcaagagggaggcgcgagcgtgagcttgctgcggtaagggcacaagctcgacgagggccggcagggggggacgttgacagacgaggtcctgagcgctggccatctctttgcagcagacgacctcgttccggccgagagatggaggaggaggagggcggctgctgcgggtcgggccgggtcgctgcttccaaacggagggtcgaaccgcggcagcagagacgacgacgggggctgcccggctgcgtcactgctgagtctatcttcgtcgacccttcaggaaagaggccggtcttttctctcgctctcttgctctcgacaccgaccctcatcactctcactcccatcgactcccagctgctctctcgctcccgacatgtcgtacgtccctcggccctcctcgcaggtcggcctgctcgcagtcaggtgccgaaggcacaccgcgcgcagccggccggcacatcgacgtcgatggcctgccttccatctcagctgctgctgacgctgccctctcccctccctggcgtcagtctctcgcggcacatcctccccgaggccattcaggccgcgcacgacgccaagacgcaccgccaaaccggccacggcgcgtctaacacaagcaagcacgccgccgccgcgcatcgctcagtccaccacgcctcgccttatgctggccgctaccaggcgacgaccgacgtgcccaagttcagcctaccaacaaagggcgtcaacccgaagacggcctaccacctgtgggtcctccagatgcttgtttgcttggactgcgagctgacctcacgaacggctgccgacctccagcattcacgacgaggcgacgctcgacggcaacccggcgctcaacctcgcgtccttcgtccacacgtgtgcgcccacctcgcacgccctttggccggatctctccccatattgacgctcggtcgcctttccagggatgccggatgagggcgtcaagctcatgcacgagaacctctttgtcaacctcgctgaccaggacgagtacccgtcgacgacgctcatccacaaccgtgcgtcacccgtcgtctttgagcgcatacatgcgtacctcaatagtgtaaatcagcagtaatcacgactgacgtcgctttctcctgtcttcgcgcgcctcttcaggctgcgtctcgatgatcgccgacctctggaacgtgaggcctctcgtcgcctcgctctgcggctctcttcgcatgctgacttgctgacttgctgacattgctgcttgcgctctgctctaggtgcccgagggcatgaaggcgatcggctcagcgacgaccggctcgtccgaggcaatcctcctcggcggcctcgcgatgaagaagcgctggcaggctgcgcgcaaggccgccggcaagtcgatccacgagcccgggcccaacattgtcctaggcgccgaggcccactgctcgctcgaaaagtttacgcgctactttgacgtcgaggcccggctcgtgcctgtgaccgaggagagcggctacgtcatggacccgcacgaggcgctcaagcacgtcgacgagaacacgatcggcatctgtcagtttccgagcttgggtccgacgcttgctagtcgctgtgctgactatgcctcgctccgtctcgctctccagacatcattgtgcgtgtccaatacaggcgcagaagcccgtcgctgtcctgctgacccttctgtcgcacacgccacagatgggctcgacctacaccggccactttgagaacgtcaagctgctctctgacttgctcgacaagctccaggaggacaaggggctcgacattccgatccacgtcgacgccgcctcgggcggcttctttgcgccgttcgtctacccggacctcgagtgggacttccggctcccgcgcgtccactcgatcaacgcgagcggccacaaggtgcgcaggcgtctctctgcagaggctcgatgggaagatgctgactcttgtccgttcctcgctaagtttggcatgagctgcgtcggcgtcggatggatcgtctggaaggacgagtcgctcctgcccaaggagctcatgtccgtcctcccctctcttgcctgtcctcggctgcctgacacgacatgctgaccgctctgctcatcctgtcgcgcctccagctttgagcttcactacctcggctcaaccgagtactcgtttacgctcaacttctcgcgcccagcccacccgatcgtcggccagtactttacggttagttcctttcttctctccatcgctgccgatacctgtgctgacatgcttcgccccgctagttcctcaaccttggcttcgagggctaccgggacgtcatgacgaacgacctcaccaacgctcgctacctctcaaacgcgctcgaggcgaccggccacttcaaggtcctctcggacgtccaccgccgggccgagacggccgccggcggcgcaaagggcgtcctcgagggcgcaaaggaggcgcttggcgtcgcggagggcgaggacgagagcgacccgctcctctacaagcagtacgtcacaggctgtacgctcactcactcgctcaccgcctccatctgaccggtccttccctacctgcctcgctctcaaaggggcctgccagtcgtctcgttccgcttcaccgacgagttcaaggcggccaacccggacgtcaagcaggagtgggttcagaagctgctccgcttcaacggctggatcgtccccaactatgcgctcgcgcccgacctccaggacgtcgagatcctgcgtgtcgtcgtgcgtcccttgtcggctctctggctcgaaagacatgagaccctccgctgaccctgaccctcgcctctccgcctgccttccgcttcgccaggtccgcgagtcgctgacggccgacatgatgcaccgcctcgtcgacgatattgtctcggtcaccgactcgctcatcaaccaggaggcgccgttcgtcgccaacgtcaagggcgtccgggccggcgccgacggcggcagcaagaagggcggcgacgttgagcgccagctcgggagcgccaacgagaacgacagcaagacgcacagcagcgggacgtactcgaagcagtgctaaggctttcctgtatcgcctccctcccctgtagctcttccgaccatcggccgatgccgctcggcgcgccgtcctgcctttctctcctatgttcctccaccgtgtgctcctcgaccgactgtatgcaactcccctctgcccgtttctgccggcacgcctcggaacgaggtggacgtggccgtctctgcgctgatcgacgtaatgtcgcgctggttgcgagccctgccagggcggaacgagtcgttgaagctgtgcaggcggccactcgagcgacctctgatctccctgcaggctcaacttgcgtaggtccaggacgtctcgagggtcgtcgcctggctgctgcagtgcgactgacgcgcatgcgcgggtcggaagcaggaagcgcgccgcgcagcaagccaccctgcggcctcctctcaagccctcgcgtcgagcggccggtgcaactatgcttgtgagagaaccgaatcaatcacttccttgcgttcttcgctgcggtcggcgactgtcgggagggggtaacgttggacgtaagggtggacgggcgaaggatgttcgtcgtggtcggccgggtgcgcaggactggtcgcacggcagctctgcgggcggccgccgccacgcagcaggcaccgccagcggaacagcagcaagcccggacgagcgagccggtgacagctgcaacaggaccgacctcctcttgacatggctcgagctctgcacacggacggcatgcagtcttctactgctcctagagatctcccgttctcctcttgcttcgtcgagtgccatcgcaggcgcgccagcgcaagccgctcgttctcccggacacaaggtcgttgtgaggcggcgtcacaaaaattgccaaagggggcccttgcttggctccgaaacgccaaccgaagccacgcagcacttctcgagtcgacgaaagatagaccgcccgctgcccagcatgaaagtcgcagcagggcctgtcggagcattctttctctcgccctcttgcgctcacttccgggcaggttcatccgggcgcattcggcgaaaggacagcgcggggccgagcagtcgcaggggccggcttgcgtaatgaatcctgacgcggggttccgggtgcgggggggatgagaggctgctgaagcgattagatacctgcacgcaggctacagtcgagcatgaggggagagggcagagatgttcggacgagggattgccagtcagcttggcgagtcggggctggtgcggattgttgatgtgcgggcgcgtgcactcagcacactcctttttccgagagaccgaccgagactagcactgatctcaagaaaggataggcgaggtcggagcgctctctcgcaggaatcgtctctcattggatcgaagactttaatctgcgcctcacttagggtttcgaaaaacaacagacgacatcccatctcgcttcagacgttcctcggccgcttcgttcctcgctcgtcgccgacacccgaagcggccgggctgtacgagcccatcgagccgccctgctgaccgccgccgcccatgctgctgttcatgccgcccgctgcgccagcgaagccggcgccgttgccgccgccagccccacccatctggctgccaggcatgcccacgcccatgccgccccagcccatgcccatacccatgccgttcatgcccatcattggcatgcctgaagggagaaagggtgcggccagatgttgggtcagcctcggatctgggagaaagtgggcggacgcgatgctgatggcgaagggcgggccgggtgaaggggtgggcgcagcagcgctggcctctgcgactggcgtgctctttttgaggcatctgactgagcccggaggggacaaggcaggcctcccgagagcggacgtcgtgaacgtgcatcgaaaaggcgtgcgagcgagggctgcgtgcggagtacagtcaagggagggggagagtgcgagggtggcgccgataagcccggtcggtcaggcggacaagagtcggaaagtaggtcgtgacaggcgtcaagcgcggaaggcaaaaacgctgtgggtgggagtaggaggatgcgcgggaaggttacagcggagcttgagagcccctcgggttgtcgatcggatcgtgtgtgtggtcgtagggcgtgtgcgggtcgagtggtcgtccgagaaaggaagtggagagggcggtggccggtcgtgacgagagagaaaatgaacagagaggagtaaagagaaaggatggaacgttactgacctcccatcatcatcgggtagggcatcatcatgccgttgggcatcatgcccatgcccgccggaaggccgttgggcatcatccccatcggaccgccgccacgaccgccgccggccatattgaagccgccgcggccagccatgcccattgcgcccatcggcgcctgctggtggccgagcggagggccagcggcagggagccgactcggcaggccggcgacgccacggccgacaacacctcctccgccgccgccgccgccacgcataccgcccgctccgccgccgcgcgaggtaccggcccggccggcattggtaggcgcgtcctttggcagggtccggaaggggttgccggtggccgacgtcgtgaatgtcgtctgcatcggcaggccgtggatcggattcgagtcgaggtagcccttcagatggctcgcgttctcggccgagtggcactcgacgtaagcgacgcccttcgacttgccgttcaccttgtgctcggagaaggtgatgtccttcaactctacatcgacgacgccagcgtcgacgcaggcccggcggatgtcttcgtccgtcacccactggcgaggcgcaagtgcagctgcgggtcagcagcgcccgcagtcggcagacgcgacaagagaggacgagggacgcacccaggcaagctcggcgataaaaagcgcgtccatctgcggaccgcccatcggcgagccagtgctgacatggccaccgagcggcgagacaaaggtgccgatgtcttgcgggccgcccgagtagacggtcgggggagcgggcgtgatgcccgaagacggtggggcaaggctcgtcgccggcttgggtggaagacctgggacccgaggcagcgtcgaagtcgaggccgagctatacgacccggcgtcagcgccaccaggctgaggagctagagcagcagactgctggccgccggcggtcgcctcgggctcgtaggacgtctgcgcgcgaggagaaagctgtcagcctcgaaagcgggtctttgagcatgcaggactggaatcctacgtactgtgccctcgtcgtcgttgccgtagaggtcgtcgtcaccgtaaaggtcgagctacggttccgaacagggcaaggcgtcaactgatgacgggcttccgagttgaacgcaacgagtccgggcgacccgcagagcgacgcacctcgtcttcaccgttcatcgtgaaaggtgtcggacaggaagttgaactgccgttctgatctatcacgaagcgcaagaccaggctgatcagaacgatgaagtctcgaagcacaatgaggaggctgaagaccggctcgacgcgtctcgcgcgctccccgcctcgccgctcatccgtccggccgcaaaaggcgaaccgaaagccacctcatgcactcgagttgtagcagtctgcactggcggactgacctgtgtcgtgagagtctgaaagcaattagcggttgttgcgagaaggtggtcctcaggcggccgggcgagaggagaagcttgatgaggcgggagagctgcaggcgacgactgagtcagcaccctgcaagacgacgctaagcgggatgcgagcaagacgactgacctgcgctgtcttacgatctgagtgcagaccgtcgaaaaggcaagggcgccggaggctctcgaggcgagatgtggtcgggagggcggcgaggtaactcgctgcgccgacttgccgctgctcttgccgagctgacggccatctcatcgagcctcgcctctccccctcttccaacccctacaactctccccgcacctccagtcagctcgtccggccatgtcgcgactcgctccgctcgtcatcgacaatggtgcgtgtctggattgtcgcttgatgaggaggaagccgctcgctgaccgccctcgccgccctaccctgcccgccgccgcctggcccatcgcgcctctcgctcgacctttcggccgtgtcccgcaggaaccggctacacgaagatgggcttcgcaggcaactcggagccgtccttcaccttcccgaccatcattgcgactcgcgagggtgccgcagccggaggtgccggaggcagcggtcggtcccccggccgtcccttagcctgcgctcgtcgaagggcgacgacgctgatgtcctccgtccttacctccctcgtgcagcccgcggcccgccagtggcgtccaaaccgtcgcacctcgcaagtaagcgcggtattgaagacctcgacttcttcatcggtgatgaggctgtcgccaactcaaagtgcgttcggcaaggctgccgcagtgcgcccagccatccgcgcgccgagactgattgacgaggctgggctgctcctcaacaggacctactcgctgcacaaccccattaagcacggcatgattgacaattgggaccacatggagaggttctgggagcagtcgatcttcaagtacctccgggccgagcctgaggaccactacgtcctgctcgtgcgtgcctctttgcgtcacccgcgctgccagcccatctcgctgacacgcgcactcgccgcctcgtccttgccgcctccctcctgcagacggagccgccgctgaaccctcccgagaaccgcgagaacacggccgagatcatgttcgagtcgttcaacgtccaggtgcgtcgccctcggagcggtcaatgcctctctcaagaggctacggctcgtctgctgaccgcgtgtgtgtcgtctcttcagggtctctacattgccgtccaggccgttttagcgctggccgcgtcgtggacgcacaacacgtctgatcggacgctgaccggcgtcgtcattgactcgggcgacggcgtgacgcacacgatccctgtcgccgagggctatgttatcggctccagcatcaagcacgttcccatcgccggcaaggacatcacgtcgtttgtccagcagctgctccgtgaccggggcgagacggcccatatcccgcccgaggaccagctccgggtcgcgcagcgaatcaaggaggactactcctacgtctgccaggacatggtcaaggagttcaagaagtatgacgacgacccgtacaagtggttctcgcgcttcgagggcgagcacagcgtgacgggccgcgtgcgtcctttctctcttcttcgctcaccttgctaccagtcggtcaccctgacccgacgcctcccccttgctcgcagcaatacggcgtcgacgtcggatgggagcgtttcctcgcgcccgagatcttcttcaacccggagatcgcgagctccgacttcttgacgccgctgcccgaggttgtcgaccaggtcatccagtcgtcaccgatcgacgtccggcgcgggctctacaagaacattgtcctctcgggcggctcgaccatgttcaagaacttctcgcagcggctcaagcgcgacctcaagagcatcgtcgaccagcgcgtggccctgtccgagtcgctctccggcggctcgatgcgggtgcgtccttctcgctttgccctttttcactcgaccgacggctgacctattgttcttgcgccgacagtcgagcggcgtcgaggtcaatgtcatcagccactcgaaacagcgctacgccgtctggtacggaggctcgatgatggcctcgctcgtgcgttcttgctaccgctcaattcgtcctttcgctctatctgacgacttcatctcactttttcgctcggcagcccgagttctacacctactgccacaccaaggccgactacgaggagtacggcccgagcatcgtccgccggtacgcgatctttggcagcgccacctgattgagcgggccgcctagagggaggctccgtcgcgcgctgccgcgagggcccgtgcgagccgagccgttgtagaatgacaccgtcctttgcctcgatctgctgagcgggaggagaagtgaaaggcgagcagggcggccgagggacgacccaggaggggacagagggtcggctcgtggagaggcgcagcagccatctctgcggccttcgcgcccgacggccagcatcttcgaccggtccagacgccctgctcgactacctccgtcctgcacgagcagaaggtacgcctcaacatcccctgtctgctgagcacgacgactcatcgctgatggccggtcctcgcagattgacggcggtcgctcggcagcctcccttttcattctgaagcacccctttcatccgccggcaggcgaccgagccggccgtcttcgaggcctggaggagctgcgcgcgtcgttgcctttgggctgccgtctcggccggtcacctccgtcctcgtctctgcatggcagatctcgaaactctccaaccagcaaaagcccaaggcaggctcaagcgagagaaccagaagcgaacgccgggcacgtggttcattgcgatcgacatcgtactatgtagatctgacgtcatcagcggagagatggccgagtggtctaaggcgctagcttaaggtcttcattggtcgctagtcttcgggcgcgggttcgaatcccgttctcttcacaatccttttggaccttttgcggagcttgctcgcttctctcctctgtctctcgttgtaaccttgtataggtctcagctcccacatcatgcgctacatgcgctaacgtgaaacatccatcagtccgcgacctcttgtttctgcctgtttctgcctcaccctgtgactttggataggcgactcctctcgaagcgagaggtcgagactcaggaggtcattttcactcacgtcactgagcactgattgtagcggtccagatcatcggcgaccgcgagcggcacgccctatccgagattcccttcacttctagccgccttccacggcctggagtcagccaaaagtagtaccctttccgctcgcggacttacgctacgaaacaactgccaaacgaaggccccacgtacgacgagatcatcctttccggagagcatacccgccatttgcccacggccagctcaacatggctctctcccgcgtctacagatgggctcattaccgaacgtggcgctcggccactggcgcagtgctgacagacagtgacacgcatattttcttagctacggggcgacgattcacttgcttcaaataaagccagccgcgcagatatggcggccactctcattacaggtgaggagctcgtttcgacaacgactggaagagaaggtcagagacgtgcagtgagcaaaggacgtggccatctggctggacggcgagacagtcaagatccgagggacagggcaggagcctcgcctctacctgcgacaaccacttcatcctcttcgcttggaaccgtagacgctgctcggctaacggatcggtcaccaaggtcttcttgcactggctcgcgctgttggagaagatccacagcgaccttacgctggtctggatttattttgtgggaaacccggccgacaggccgtcgcgcgaccagccggcgcccgccagtcagcttgtccttccgctacctacgatgcaactcacctgcaatgcaactcaccttcagaccacctcccatcgtagactcatgaccgaagtttccatgtctcttccgcgactacttatatctttcagcctgtaggacgagacaggaggcagagccgactcagtctcaggactaatccgtgaacgactcatggatcccacctataggacgagaaaggaggccgggcagacgatgggggtgagctactgcctaggctaaggggactgagactatccggagcgaacgtacctcagtctcaggactactccgtgaacgactgaggtataaaagtgggggcgagcgggcgtctacctcagaggagaaagcgaaaaaaaggagaaggaaagagcccggcagactctggggcgcggcgccccgagtggccgctgggcggtcgccaggcgcgcccagaaccccgcgctgcccggccggcgctggcgcagcaaccacttcaacacagccctcagtaactaggcccggtccctttgccgccgaaggtagccgaacttagtcaccgcaacagacggccgcgtctcattagctgcgcagcagcaggcccgcgtccggtcgcaggtcgaatcgaggtataacacagtctctaagtccagaccgagcagatgggcgaacggaggcgtcggccggccgatcgagacgaatggaccaggtgtacggccgtctggcagcattatggcgaaagaatggaggccaagccggccaatcgtagcgctagtaccgctcgccatgccgagcgtcccggtcgaaatgatgtggtcgtagcgcttggcgctcgacacgaagtgtggaccgtcgtgcgaatgagggacgattgcgggtgcgcaggtgctcgacgtccaattctgccagggccgcttgtgcaggccgacgtacgtctcaagccaaacgaccatccatttcgggggtaggttcgccgcaaagctccaggccaggacggccaagctctcgacgccgtcctgggcttccagtgcccaaccgtcctctagcccgcctgtacccacaaggccggtcgcgtgctatgccgcatgatggccgcggggtggtagagcttcttcggatcgttgtcgggcggcctggagccgccgtcagcgctgttaaggccggcgagcgtaccagtgatccgggcgaaattgtcgccgacgtcccggaagcgcggcggcagagggcaaagagtgtggccgcagcgacccagcttagctttggcgcgcttgcggcgaaaacggccgccggccatacgacaggagattcagtccgacccagcgggctccgacacgtcgcacgtcaaacgacacatcgccaagcggcttcaggacatcatacatgcccgatacgaggaaggctgctgggacggcgcttcgggcaaggccgacaaggtgaatcgggaaagtcaaccgaggactaggttttcccgtcggagtcctgcatcgtacaagactgcagtccgagcgtcgacttgatagctctgaaaaccaatgacgaggctgtggaggatgtcacttacactaacgccgccgggacttggcccggagcggccgacatctcctcttatctcggttctattgagaagaacattggatatagaacgacctgaaaccgttctcggccgaataccagtggttgaagctgatccctcattgcgttgtagtcaagccgacatcttacccaaaagtgttgaggaatgggtgtaatttaaagtcgcataatctgtctggcttcattagctcagcggtagagcgcgacactagtaatgtcgaggtcagtcgttcaaatcggctatgaagcttccatatctctttcttttggccctgctttggccctgctttggccctgctttggccctgctttggccctgcttcggccatagattgacggtcttggcttgcgtgcagggtttacttttcgttagactgcaaaagagggaatacatgcacaggagggaatgctgcagagaacccatacgttgattgttcgactccgaggatcgacagtcagcggcgcaatccggcggcttgcttagagttcgattgtcgggttcttagattcacgtgcagaagctggctgtcgcccaatttagccgtcgagagcggagccttccatcaaagcggtatcgcagctcgaaatccgcgccgcgagcccatgcaagatgcttcattgccgcgcccgcacggctcaagctagcgcaaacgagcgcgcatacttcaccggcagaccagtgtcgactgtcgccacagtttaggtgatgctacagtcaccaaaggttgatcctgagccaaagcttgctgtcgccgatggctgaccaggcgccgactggcgctcattgaagcgagacggcagtttaaatgcttgggtacgtagaatgaagacttgctccatactgatattacttactcactcaaatgagtcttgttacctatgagttgaaaactgaaggcgaaagccgaaccctacttctgcacatgctcctacacggcggaggacctggccgtggactggtacatgtcttggacgtctacttaggcggagcccagaacaagcgccgctgtgcactcgagcgcgccgcagacgcctcgcgtcgactgccccagcccccgaagaggcgatctagcttgagcgtgttgtcgaggtccaacgtgcgcttcggccggcccgagttggcgacgacggaggacgtcggccgacagcggctcggcaaagacaaagccctcgagctggctgaccgaatggttgtctggcaagtcgctcgcgtggtcggtgaacgccttggcaaggaggagggcgagcgcgccgaggaaggcgagtgtgccgaggagggcgaggaggccggccagctcgtgcgaaaaggtagccagcaccgtcaggtgcggtaggctgacgctcaggcgtggcgcgtcgtcgcgtgtcaggaccttggccgagtccgacgacaggcggtggcggttgccggcgttggtggcgccgctctcaaactgggcgatggtgccgcagttgaggcggcaggggagggcgagccgtcagcggagcttggcaactatggagaaggctagggaaggaggattcggtcagcaagacggtccggttgggaagagtccgaaggcggcagcgttgactcaccgtcccacaccgccttctgtccatgcacggcgagcgctggcgcgacgggaacgcggccctgccgaggcgaccgaccgatctcgaggaggagcagcgtgcgccaggtcttgccgccgcaccaaacaaagatatcctgcgcgaggaggggaggtgcaggtcagtagaggacgccggctcaggaaacactgcgggaggactcacaccggcagctgtcgtctccatgccgaccgagctcccagccagcagcgagtagaccacgtgttgccttggaagtcgggctgttgccgtatactcacccgcttctcccgtcagcgcgccgctggtcgccgacgcaggtgagatcctgactttcgagataggcggccagcttgacccacacgatgacgagctgaacgaggaggacgtaaactcggagcccatcgtcgtcgtcgacggtcagcctcaatcggaagcaggctcgtccgtccgctcgctgtcgccgccaatcctgcctcgcgtcctcggatcaacaaccgagccacgcctaggcctgtgtttccctggacacgtaccgtacgctcacgtcctagaacaacacgtgcgtggatcgaacgtccattgctctcgtcggaccagagtgtgcaatgccgacgctgctgcgacgagaagccgaaggcaagtgcagcgtaggcagagaccaaagatgataggcgttcagaggactggttgtctggttgtcggctcgtatcattaacggacgacctgggcacgccattccgtgcgcaaacgcgcaagaaaaaagaacattagccccatgggggggtcgaacccccagccttcagatgaaacccgctgttgaacagaccgtgttaagagtctgacgctctaccgattgagctaacagggcgtttgatggttgccagaactcatgtgtaaaatgtatctaagagctcatgtgtaaaatctatctgaaacagtttgcccttcacggacccaacgtcctctggtgcaactctaacgtggcggctgtacaaagggcgggtaaaatgcaagggagtagcatcatattcacccgcttttcctcccgatttatctcgcgttcgtacagcagtcaaagcggtgaggtttcgctgaccattggtctaagtctgagctaccagcgcgttgacatggtctgcgggaaagttaaaaagctggcagctgtcaagcctcatagtcaagccttaatcacgaaagccaatgaaggcattgaggcggccagaagggccgctatgttttggccgctacggtgcccgcttccttgcaaacgctcccggaccgcaatgacgcggtcgcctacctcaaggctaaccccctcgagcgatgggcgacggttgcgctcagggtgctgcagtactgtacgcacacaatcacatgtatgatcagctatccggaacctaagcaataagctctcgagtctcggaataaacacgtttggtccgggtgcgctcatgctgccgcagtacgaacgaacgattttcagcccggtcaaattgcagcttggcgccgcggagaagcgcgtactcgatctcgaggtcgccgctcagggggggaccgggtggctactcgaggcagcgtgcagaggagcgtcggccccaggacgagggaatccgtccagctgatgggccagatccttccggctggtctctggtaccgacccatcgggttgtgctcgaggtgcaattgcgagggtggatgatctggcacgcggggcccgccgtcgctctcccttcagccccttgcacgaagccatccctgctttcctctcaggctccccactccgatccgcctctaccttcttcaatctgacctctgtctttctctacgccccattacctctccaaagcctccaagcacggcctctcgaccggcgccggcgtcatcgacgccgactatcgtggtcccgtttttgtcctcctcttcaaccactcggacaaaagctacgaggttgcaaagggcgagcgggtcgcgcagcttattctcgagaagtacgaggtggccgaggtcgaggaggtcgaggtgcgtttgacgctcgggcgctttctttctcctttctcgaccttcgtctcctctgcgtctcgcgcgtgacgctgaggcttccagagcggttaatccctctggacagcgctcgagctcgaccgtcacaccctctttgctagccagagccgtcgcggacgcctatagaccctccttaggaccagtatctaacgcctcccctgtccgcaccccctccctctccgcaggagctcgacgacaccgtccgcggcgcaggcggcttcggctcgaccggctccttcagcccggcaaccgccgcgagcgccgtcggctcggccgtcgcggacgtcgttgggaaggtccaggcggcggttggcgcgaatgaaaaatagagcggctctaggggagcggctggggagaggcagaggaggctggtccttcgtggtatgcatcgatccctttcgcaaagagcgaacggcccccggcccccgcttaggtgctggggtcgggttggcgaggcttccgtttatgttggctcgtcggaaagtgcagtgggtcgggtcgcgacttcatctcggaagcagcagccgctaaatcgtggtcatggctcgttgctacgggcgccgtcgggtcggcgtcgcgcccggttgttgcccgccttgtcctccgcctgtggacgtctcccctacatctcgccgcccacatcctcgtcctacgtccagcagcaggacggctcgggacctagtccatcttctctctgcgcgagcccgcatgttccgctaccccgttgtgctgccggctgacttcgcgtcatttggcgcacacgacgcggcgagggccgagctcgcaccccctctcctctcgccggcagtttcctcaacgtcgacggcagaggtactgcctgctgaagcggtacgtggaaggacctggatctgcgctggcgttctggctcgctcaggcttttgtcggccgcctcacgtcctctttggcgtgctacagtgctggggcctcctggccgctgcgctcgtcctcgacggccgagctcagtcgggcgagacgcagccctcctcctcctcgctggtgagtcgcgtctccctttgattttaagatagtccttgtagctggactaagttcgtgctcctctcctctgcttagggtgctgccgaaggcgagaagccggaaggcgtgcctgccacatcgtcgccggtcaaaggggctgctgcggtccgagcgcccatcgccttcaaggtgcgtgcgctcatctcgtccagcccgaactcgggccacggctgatcgcctcgaccgaacttcgcaggactcaagctactttgaagtcgacgccgagtccccgcccgagcagtcgcccgacgacgccgacaatgacgagccgccgccgttccagctctcggtgcgtcacccttgccaggaggctcctcatcctcgtcccaaggccgatcaaacctttcccttgcaaggtccacaccctctcgagattcccgaactgcgcgagctcatcctcaattacgtcgcagtcgacgtccacttcaacgcctcggtcctgcgggtcaacagcagcttcctcgagcacttctaccggcggctctaccgctcgatcaacctgaccagcccgctccggcagccgaccaagtttctcgagtcgctcgaggctcgttcgaccgaggcgcttggcgcgctcagcataaactcgctccagttctggctccgcgacgatgaccgggccaaggactttcttcgccggctcggccgagtcctccaccggtcggcgccctttgcaaaggccgtcaaaatgctttcggcctacctgacctgcccggaagacttggaagacgaccggccggacgccaagcagctcgccgacgtcgtcgccgcctgtccaggcctgagcaagctcatcctcaagggttggatcttgaacgacttctacaacagcttcttcgaccgcctgctcgcgtgctacccggcggccgtcctcaaatggattgaagggctcttcatcaacattcctaacgaagcctactctttccgcgacaaggaggctctgccttcccccccaagatcaagacgatccggacgctgttcgtcgcgccggccgccggttcgcggtcggccgacctctcggtccagatcctgttgatgatcctcttctggctcgacggccaccagcccgaggccctgacgctcgtcatcggcacgggcctgaccgcctggctcgacgcaagtcgtcgacagaggtcaaccggctcgaggttgccctcgctgagcggctggtcaaggagcgcgggagcgaacttggctgccgcgtcgtctggccaaaggcgctcgacctgggcgccctgctcgacgctgaccctgtcttccgggaggtcggcctgatgggcacggtcgacctctggcgcgagtgcctctggcccaaaatgtcggcgccgctcggcatgggggccggcgccatcctcgacatcctgctcccgatcctgccaccaatggccccggctgtactgttcgtggcgtcgatcgactgaggcgacagatgcatgcacatatttttagcgttacatctcgggtgtggtcgtacagcggccacgagggcggtagaggaaggggaaaggggaaggcagctctctaatagcggggtccgcctctcggcgcgccccggccgttgccgtacgctccccggccaggcggcggcggcggcggtgcaccgtagcctccgccgccgtagccgccgtaatggccaccaggaggcggcggcggcggtgcgcccgggtaggacgagccatagccgccgtactgctgctgaggcggcggcggtcctccgtagcctccgtagttgccagagggcggcggcggtccgcggccgtaagccggcagtgtcggcggcggcatgccgtacgtcggcggcggaggggcgtaaccgcctcccgagccgttcgagtagccaccgcggccatagccggccggtgtcggcgaggcgacgtagccatcgcgcccgccggcgccgtaagccgaggacgagtaagcccgcgggctgtcctgatagggcgagccgtttgtcgacgcggccgagccagtcgaccaaggcgatccaaagccaccccgacctccgccaccgccaccgccgttctgggcgccaccgcggcccgagccgttgtagcctcccgagccggggccgcccatcatccctccgccgcgtccgcctccgccacggccgccgcgcgagtcgttgccgccccggcgcgtccggtcggcgtcactcgccgtaagaatcttcttggcctcgatcaggccaggaaggagcaccgaccggtgcggctggttctgggccgggaaggcaaagttgaccgagagcgagtggtcgtcggtgatgtcgccgagcggggtcgacggcagcggcgtgtagtaggtcgagccgggcacgcagttagggtccgggtcgacaaagccgctgatgcccttggagagcgacgggtccatcggcgtcttctgcagggttgcgcgcggccggtcagcagaaaagcatggcgccaagaagcacaagcaggatgtaacgcacgacaccgtccttctgcttcttcgagtagagccggcaaaaggcgtcgtagagcttatgcttgtcggcaacaaagaggacgtcgcggccgggcgcgttgcgcttgacgtcgtcctcggatagggccgggtagcgcgggttcatggcgtcgagcagccggactgggtcgatgaaaggcaggagggcgacgccctgccactgcatcttcttgccgttcatgtcgatctcgaaatcgggcgggtagaagtcgatgatcgggctctcgggctcgtacatcagcggctggaacgtgctcggaatgtggaccttactatgagggggttggagtgcccgaagggtcaccgtcagctaacggcctggaagatgagaggaggcgacgctgagggagagggcgaacctggccgcggggaagacgcccatgagctgctcaaacggcttgaagggcgcgccgagcgtaaactggatgtccatcgcgccgacatcctcgaaatcggccgcaaacggcgcaaaatgaaacgggtagtaccactgccacgagggggtctgcaagaggcgggagagcgggaggtcagacacgcacgatgcgcgcaaaagagaaggaacgagaggggccgcacgccctggtaatagtagtgcaggacccagcagaggccctcgatatagtgcgtcgtcaccctgcgagaaagaagtgcgggcccaggtcagtaccgacagcagcagcaacggccataaaggggagcagcccacttcttgcggaactcggcatcgctcagctcaacgccaaacttctggaggtagtagcgctccttatagcccggctcccagagcttgaccgtgtcctcgacgtcgaccgagccgtccgggttgacctttcgcgccttggacggctcgatcggccggtccatgacagggtcggtcgcgagctcggtcacgggcgcgccctcctcctcctcggtcgtcgtcaccggcaggccgtccgagccgatcggtgtcgacgaatcgaggtcggggtcgtcgtcgaccttgcgcttaacgccccggtgcgggctgctcgagggctcggcgctcggcggcggcgccgcctcctcctcagcagcagcggccgcagcgacgacgccctccgtcttgatctcctcggcctcgaccgccggcaccggcgtcggctcttcgtcctcggtcttgccgcctgcaagctgggccttgagcatctctgccgcgctcatgtttgccatccgcgcctcgcgccgcgagcggacaatgtcggcgttgctccctccgagcgccttgacagccttggccttgtcggccgcctgctcgtccgccttgacgaccgtgttgaacgccgggcgagcggggaggcccgagccagccggaagagccgcagcagccggcttagcagcgacgggcacctggacgagctcggtctcgccgagcgtgacggtcgcgaggttcgatcctgcgctcggcggcatcgccccgccgttcgcccggcgatactcgtcgaccttacggcgctttgcgttgttctcctggcgctcctcgctttcgcgccggcggcggaaaatgtcggcctcctccttggcgaggccatcgaggatgacctggacccgatcaagctcgagccggccatggttcgtaacgtagccgcccatccggccgagctcgcccttccagatgcgaaggagcgtgtcgaccgcgccctcgcggatctcgagcgagggcaggtgcggcaaaaagtcgttgccgacgaagaagataaggaaaatccagtcgtcgagcgcctgctcgaggtcaaacgcaaacggctggttgggcaggcagagctcgatcgcgaggtactcgcgcaagaccgagacgtcgagaaagatgaacggcttggtctcggacagcggcttcgacaggtcaatctcgggcttcttgggcgcgatatctggagccaggggggggggggattgggacgagatgatgggcgggaagagcaagtgaatgggaccaagcggggcggcggggcggtgtcggcgcgcgcgcgttgcaacaggcaccgcggagtcgacgacccggccgggcgggcgggtcgaggcctcagctgggattttgagtgggcgacgcagcccctccgacaactcgcaggcgcactttccttccttgcgccgccagaagagccatacgaggtcgacccgagcccggtccggaccgcgagaaatcagagggccagctgccggaagcgggcgagcgggtgaggagctggcaggaggggattctccgagcaagcgaggtagatcgtcgctcgggaggcagaccagggagcggcggctgcacggagcctcgattttgagcgaggctcgcctttcctcggaggtgtatgacgttggtcagacttcttgccttttgggcgacaatgctcgacacgatagtctctactgccagaccaaggcagctggcaagatcgagttgatgcgtcaacgtgcgccagtgcggcgtcgcccaagagtcgcgcagctcgaatgcacgtcgccttgctggccctcgagcttccgacagacagaccactctcctgaagtcgctggaaaggctgacttttagcggcggcctgccagcctgctaataatgtcgccagtccaccgtctcgatgccctgtagccaacttgcaagcagctgaagagcagagggcactggcgcgacacgactccgcctgcgtaagcgacgttctctcgcgctgaccgaaccgacgagcgcgacgcctcctcccgcccgacgacctcgactcgatcagcctcccgcagcctacgccccgactccgcccttcacgccctcttcctcttcttgatcctggccaccggctcgacagcaccgtagctcgacccacgtgtcctcgtgcttgcgaggcctgccgcccgtcctatggccttcgagatcccggcccatctcaagaaggagccctcgtcggctccgcccgcggcctcgaccgcctctggccagccgatctcccctaccagcgcctgcacgccctcgtcgtcgtctgcgcacatccgctcacttctcgcgcctttgcttgcggaggactggccgaagctgacgccgagcgcggtcggcgcacatcgccagcagctcgagctcgacgcgcaggcgaccaaggtacgactcgcctgggctgctcggcgcttcccgaagaggtccagctgatcctcggacgtgaccttgctctggcagacggccgtcctcaagctcatcaagggcaactatgcgtcagtcggctcgcagctgaacggcagcctcgagagcgagagccggacggctgagctcaagcgcaagctcggcgcgctcgaggacgacgtcgatggcgatgacaaggtccgccagtttgcacgtcgcttttgcgtcgatgtagagcgctgaacccttctgcttgtcgtcgtcggcagtctctttccctcgttccgccgctggtctcggccctccaggcgcactcggcacttgcccaccggctcgcgctcagcaagcagcagctcgcgctcgccgagctcctcgctgagtaccgcgcgacctttgcgccgctcgtcgacgctggcggtcgaccggcggcggcgttagatccgctcgaggccgtcggcgtgtgggctgagtgtcgccgcctgctcgaccgacccgagtggagctggggcggcagcaacaacgctgccggtccactcaactcgctcaaggccgacctcagccagaggttgcgcgttgtccgcgatcggatcgaggaggagctcggcgcccttttcgacgggctcgttagcgcgagctgggacccaacgcagcgaacaggggtcgtcagcgtccggcggccggcgaccgagagcggcacgacgacgtcggctcaaaggctcgccgatgcgctcagcgagctcgggacgctcgagggccggacgcagacgctcgtcggccggctcgtcggcgacctcttccggccggcgttcgcagcggccgcatcgctgggcgtcgcgtcctttgcgaagtcgatctcagccgacggctcgctcgcgctcttccatctcgttctggccggaaaggacggaaggccgtcgcctccagcgacgtcggctgaaaggacgtggcagacggggccggatttcctaccggcgctcgactcgctgcttgactttctctcgccggcgcttcctcctctcccatcgtcctcaagcggttcatcgaccgggacgaccattccgccgttcaagaatctcgcggccttgctcgtcccgaagctgattcctctaatcgtcagcgatctcctcaacccatcgctccggacgattgtcagtgagccggcgttcctcccagcctttgcagcgagcgctcaagcctatgccaactgggagcgccaggcaacttccggccgctcgaccgagcttagcggctttgcaagccgcgtcgggccgacctgggtccggctccggcgggccgacgtcctggcccgcgcgagggagctcgtcggcgggacggtcgagggcgaggagcgggacgacagctggctcgagcgcgggaagcggaacggctgggcgagctggacatgggagcgcgagacggtcgtcgagccgccgtcgcccattgaggttcaggagccgacggtcgccgtcgatgccgacactggtgtcggctcgtcgtcgtccgttaggcctgaggcgccgtccgcagtcgccgacgatgccggggctgacgactgggcgttcgacgacccggtcgacgtcgctggaccgagctggccgcggcaaaccacatcggctccggtcattccctccgccaaaccgaccgccgaagacgatggcgtcgacgatgcttggggcttcgacgatgacgacgacgaggcgccgccggtgtcgaccaaccttcccgccctcgccaccgacgacgacgccgccgagcccgacgcctggggctcctccggctcagacgacgacgcagcaaagccgatcgtcctcgctagccggactcagccgccacgagaggcaaagcggctcggcaagaccaaggccaagctcggcggcgccagtagcggcgattttggcggctcgcctccgccagcgccgccgcctgccaccacggcatcgcagagctcgagtctctcgcgcatcggcgccgagcaggtggacgtcgactcgagctcgggcgcgagtcgaacaggctctcctgggccggccgcccgcaagggcgcgatgaagcttggcaagaaagctttggtcgccgccacccttccgtcgcctgatggcgaggccgaggcggcgctggcggtcgacgagcggcccttgacgccgacgggtcggccggtcatcgctgctggtccgcggaccgtcgtcgaccggcttcagctgagtgagcgggtccagccattgtttgagctctgtcgggccatcgacgacgacgtcaagactttgcaaaacctcaggtgcgtcgccatcccctcgttccagcttgagaaatgcgctatcggctgacgagcgcctcgcccgtcttagcgtcgaccgtctgcccgccggcgcttcggatgccccgccctcagccctccttcggaacgtcatccccgacgtcttctcgctctaccgggcgctcctgcccgtcgcccaccaagcggcgatcagctctggcccggcgctcgccatgcaggccgtcaacgactgcgaatggctcgcgaccgaagccgaggccctctttggcgcagacgacgtctcggccggccggctccggagcgcttgccggcggtggttcgccgacgaggtcgcacggcgcgaggcggccgtccagctcattctcgacggcgcctttggctttgtcgacgtcggcgatgagcagcgcgggtttgatagcgagggcgctgtcgcggatgccgtcgctcgggtcgaggagctctcctcgtcgtggaaggtgcgcgcccctcttacccctgtggatggtcaatgtttggccaactgaagcctgaaccctttgatctgctcccagcctgtccttcctctcgaccggacctttgcagctctcggcctcgtcctcgacagcgccctcagacgaatcctcaaagaggtcaccgatctggacgatattacgacggccgagagccaaaggctcaacgagatgttcaagctcgtccatccgctcgaggcctcgttcactgagggacccggggcagtgcgtctcttcacttctcgcttcgctattgcggcgcgacgcgatctccgactgacaagcacttcacaacccctcgctgctcgccagccgtcggtcgtcgtccactacgtcccctcttggctcaagttctgctacttgtccgagctcctcgaggcctcgatggccgacatcacctacctatttgactctggcgcgctcatcgactttgagctagacgagctcgccaggctcgttcgcgctctgttcagcgacaactcgctccgggccaggacgatcgacaagattatggagggccaccccccggccgtctgagtgtgcgtttgtcgatcggatggactcccccactcctttctctctcgatcctggccgcgagtagtggcccgctgcgcgcagtcgtggactcgccggatgtccggatgtccgtggtccgcagaccgcgtgccgaggagacagagagaaacacatagcagaaatcacgtcttgagccggtcgtcgcccatcttggctctcggtgcgccgccctgccagagcgtcgtccagtttgtccggcgctcgagcatgctcgacgcctcctcgagcggccggccgctgctcgtcccccgcgccatgtctgcgctcgccgcccggatccggcgcgtgccgtctgtatcttcgacgacgcccgctgctgctgctgagggagcgatgggccggatcgagccgtcgtcggcgatgccttcggctgccgaaaccgtccggacctgctcgcggtaagccatgatcctcttctcgtactgggtggtggtttggtggaggaaagagggagaggacagcggtcaggcaagcgggggaagagcatggggccgcgacttctcctcctgcgaaagaaactcacctcggtcgcgatatccatgcgctccttatgaacgaggtacatgaagcccaggcccgtgatctggtgggcggggaaggggggaaaagagagagcaggcgtcagcgagcccaagtcgggcgggaaccatcggtcggcgccgaggctctctgcgagccggcgacccggcggtggcagcagcttcgggcgaggggacggacaaaggtgccaaagaggccgaccgagaggccgtactggacgtagtcgaacgcctttgcgacacgacgggaggccatgctgaagggagtgtgagagcagtgggcggtggttcgaggcgggcagaggggcagcaggctccggcagcaccagggcaggccgctcgtcgcttcgaccatcgtccggccatcttgcctcgaccgaccgatcttaacctgcacctgttccctccaacgcacgcccatgtctgccgtccgtcgcccgcacggccactcgacgccctcctcgccgccctcgtcaatccgcaccctcctctccgccaacctcgccgcccagtctgtgctcctcccgcagctcctcacgctcaccgcctccctctcgacaccctcttcctcgaccgcctctgcacgcacgcacgccgcgctccagcgcgttgcgggcgaactgaaggcgctcgacgaggaactcgcggggttgacggaacgcgcgagggcgcatgcgagccgctgggagcggatggaggcgctcaagagggagtgtgtagcggtcgagggcgaggtgcggaggagggcgggaaggctcgagaaggcgaggagggagttggaaggggtcgtcagggaggcgaggagaacgatgaagggcatcgagcaagcgagagaacgtacgtccccccccccctgcgcgttgctctcgtcgctgaccgctttgttcccccggcagacgcccggcacggcgactttggttgctcaaacctccctccctccgcctcctccggccggcccgagctcgccccaccctgcttccgccccgccgcgtcctacctccccgccgtctcgcacctgcggacctccctctcggagctcaagcagacgcccatcggccggcagaacgtcatcgtcttttcggacgagacggacgagggctggtgggagggcgtgagcgagctcgggtggaagagggtcgaccatgcggtgctggggacggccgcgaggaacgacaactggtatccgaccctcgtcgacggcgtcatgatggcctctgcaaagggctttagtgcgtttccccgccctccttccctcgcttcgcttgtggtcgttctgtgccttcgaggaactgacgcccgagccacttctctccccgcctctagtcggcacgccaggctcgacctattcgctctttgccgccctccgcgtccgcgactggaacgacggtctcgccgtcgaggagcctcgctgaaggccccagctctacccacccactctgtttttcgtcacgcgttgtactcctctcaccctttcgtcgtctggacactctctggcgttcatcttgctcccatagactcttccgatacccccccaccccatctgatgcctgccttgctcaatcgacagaaggtggaccgaggcgcaaggaagcctcgcaagcgaaagcacgaagggtccagttttgagcagatgggcaggcaagcaggcaggcggcttcgaccgccaggacaagcagaaggggggggaagagcgggggaatgctagaggaggagaagggcggaggagggagggaagatgcagtggacacggcggtgcgtgagggagaggaagagagagagagagatgcgtgtgtgccgagcaaacaagagattggagagagagagagagagagcagagtgaggaagggagggcggcccggaattcaaagtgaaagaggaaaaggcgacggggctacggcttgtcgacgctcgtctgatgctcagcgacacttgccattgactcgaccttgcggagcggacttgagcccgagctgatgccgttggccgcggccgagagcgagctcgagaacatggacgagacggacgagctcgaggccatgggcgtcaagaggccgaggcctttgtgcgacggcgtcgtcggcctcgtcgccagcggcgaggcgagcgccggcgtgttgggcgtcgaacggttgtgggccatgtgggccttgatgaggtgcccggccgcgagggcgctcatcaggctgagctcgccggccatgacgctcgcggcgatgatgcgcgcgagccgccgggcattgtggccgggcgactccatgtgggcgccggcgacgcccatcatctggaggcaggcattctgggccgggaggaaggtgccaccgccgacggtcgcgcactcgatcgccggcatcgagacggtgatgagcaggtcctggccgtggttgatcctgcgttgggatcgggagagggagaggtcagccttcgctgcgagggagggggggcaaacgaaggccagggacgcacggctccatcagggtcatgcacatcgacgactcgacattctgcgctgggtcctggccggtcgcgaggaagatggactggggggaggcaagagaggtcagcgtcgtcgggtctttgctcaaagcgcgaagaaagccaagcacgtacagtgaggatattggaggcgtgggcgttgaagccgccgatcgagccggccatcgcgctgccaatcaggttcttcttgatgttgaggttgcagagggcctcgactgtcgtcttgaggaccgacttgacgacggcgccggggacgacgcactcggcgacgaccgacttgccgcggccctcgatccagttgatcgccgacggcttcttgtcgatgcagtagttgcccgagagggcaagaatttgcatcgagggaaagtactcggacatggtctcaagcgccttttcggtcgccttgccggccatgttcatacccatcgcgtcgccggtcgccgtcgcgagtcggatgtagagcgaccggccggccatcgcgcacttgatgttctggagccgggcaaagcgcgaggtcgagtcaaaggccgagcggatgacgttgaagccctcgtccgagtcgagccagcgcttggcctgggcggcgtcggtgatcgaggggaagtcgacgaccggcccgcgggtcatggcgtcctgggtgatgacggtcgtgacgccgccgccggcgttgagcgccttgcagccacgcgaagtcgaggcgacgagcgtgccctcggtcgttgccatcgggatcggcaccgcctggccatcgatcgtcagcgggccagcgataccgacggggagcggcatgaagccgacgacattttcgcagcaggcgccgataatcttgctatagtcgtagtccttcattggcagctcagagtgctcgagcgacttgctggcggacgcgcgggctgtcgggagaaagaaggagggcaaagtcagtcaactaggctcagacgagtgaccaaaggtgggagggaacacacagatgaccgcccgccgaaccttgacggcccgctcgaggttctgaagcgtcttctcgagcgcgtaaggcgggatcttgcccttctggacgagcatgatgacctcctcgtccgaaagctcgaacggtccgagcccgcccttcaagatctcgacacactcgtcgagcggccgcataccgagcacggtgtctgcagggagggcgacagggccattgccgttggcgaggccgtcgagctgcggccggtcagagggcccgcctatgatgagcgccggctccgagacggtcaggccgggcatcggcttctcgatccgaggcgtcaggttggccgaggtctgggttgtcagcgggggccggacggcctcgagcgtgtgcgagcgagcgtcctgagcgacctcggccttgtagcgcttgagtcctgggtcgagctggatggcgaggccctgggcggccgggtgcttcttgccggtcgccggcgagggagcggccgacggctcgccgtttgtgtcgacaacctcccagacgccaagcagagcggcagccgcagcagcagcagcacctcccggcccgcccttgctcccggcgccgagcgagatgcccttgaggaggaaggcgttgaggaggatgctgacgccgagcgtgacgatgatccatttcgacatgacggggtcgccgacaaggttggtccactcggagaggaagttgtcaaacaggatgagcccgtgcggccgctttgtccgcttaggcttggccgaggtcgggattgtcaccttgaagtggactggcggcgtgacgtgcgcgatgagctgggtcccggctgggtgggcgcggacgagctcggccaggacgggcgcgatcgccgcatccgtcacgtcgacccgggcggggacggcggcattgtagtcgaacgacgagtgggtcgagtgacggttgagtgccgtcgtctcggtcagcgtcgtgcagaggttgaggatgtggagaaggacgaaagcgatgatctgcccaggaagggggagagtgtcagtgagaagcaaccgggtgtgagacgggcgccacgcacgaggaagagcttggcgtgcgcgagcgaggcccttttgccggtcggaggaacgccgacgccgccctcgtcagtgccaaagagagcttggccggcccgctggaggaacgtcggcgtcggcggcgcgcccttgaccatggtcttcttgctggtcgtgctcggccggttggtcgagctaccgttcggggtaggcgtcgagggcacagtgaccgagacccggccgctggccgagccgtcatttaggccgcgcatgagcttgatccggtggacctcgacgaggatcgtcaggatcgagacgtaaaagttgaagaggaaggcgcagtcggcgacgaggatcaaggccgcgagcttgcagaagtcggtcaggccgccgacgccagacagggcgccgacgacaaggacggtgacctcgagcgcatagtcacggacgatcgccggcccgacttggccgacggccgcgacggcaatgtcacgggccgagacgggcatcgcgtactggagctcgagcttttcggccggcttggtcgcgagctcgtcgttggatccgggctcgatgactggcttgcggcggaggataacgggagtgatgtcgggcgaggtaaagacggcctgagcgagcgtaaagggcttgtcaaagccgacggtgatgacgaggaacggcagagcctccgaaaggcaaatcgggtcgaccgtgacgccgaggagcgaggccgccaggagggcgacgagaaacgcaaagacggacgagatgatggtcatgcccgggagccagaaattggagcccatccgccgcatgttgacgacgagccggacgaacgtcgcgtgcatgaggacgtagccgaggaggacgatgaagatgtcggccgagtcggcctggacggcgagcgcccagaagcgcatgacgagcgcgacgaacgcgtagaggacccacttagtcgaccgcatctcgccaatcttcttgccagcgatcgtccggtcggcgccccaggcgaacgagatggagcccgggccggcctcagccgtctgcggtcggaccgttacgccctcaacggcaaagagcggaaggttctggagccgctggctgaaggcccggctgagcgaggcgaggctcatgggcgagctcgctgggccgccagcgctgaggagcatcgacgaggccgggagcgaggccgggagggacgaaaaggtcagggtgacgaggaaggaccggggcgtcaggctcgagaggtggaagcagccctcagcctgcgagacggcgtagcagaggtccgatgcataggcgagcggcgtgccgtccggcaggccggccttgaccgacttgagcggcgcgctcgacgaaaggttggccggcgcatgataagggaccgagagcgtgttgagcacgtagtcttcgaagcggcccatggcccgctggacgccttcgtccatgagcccgctactgctggcctccttgagcgcggcagtcctgagctcggccgcgtcgcggtaaaagtcgtcatcgaggtcgtcttcgccaacgaggccgtgggtcgacgaggcgaaccacgaagacgtctttgtcgaagtcgccgccgactcaggcgcgtcaagtgagacgacgagctgcttgacgaagacgacacgcgggctggcctgcgagccagagaggaaggcaccgcccttgcggaccgactcccagtcgtcgccggcgaggtcagaccagccaccgctaccgtcggaccggtgggcgacgaggctgcctcgaaggtggttgccccggacaggcgcagagtcggagaagctgaggaaacaaagggacgcgaccgagcgagcgagcgagcgcgcgagaggcggcaaaaagagggcgaaggggtcagcgccgagcaagaggcctgcggagagctgccctcgcgagggacgcaagagccaggacgcacaagtccgagtgcttgatcgtgtgcagcagctgaaagtaggtcagggtgacgatgatgaaggtgaggaggatgacctcgattgggtggatcgacgacaagctggcgatccgccggaggagcgaccggaggctgagggccgacatgctgcgaaagggagctcgagagctggagggaggtgggagtcgagggatgagacgagcgacgacggaggagcgacgacgcgaaggccttgcgggaaaacgctcggttgggggcggagggagggaggttgagctcctggcttgttcgagcgacccttcttgagcgcgtcggactaggagagtgggacgactctagcagagggcgggaaggctgcgtgcgctggagagggcgcgggcgggcgagtcagcgccgtcgtcagtccgaacgccagtttggcagccgaaggacgcacccgcgtcttcttgatgagagcattcatcgcgccgacaccgccgcggtcgccgcccgacatgccgtcgacctcgtcgaggatgaggcatgtcttgtgcgtgatggccatgccggtcgtcgttgtggcctgcgatacgcgtacgcgatggatggcggtcagcttctcacccacaacggacgcagcgagggacgggacgcacgccggtgcccttcatccagccgtcgacgctctgattgtcgatgttggtgccggtctgaaaggggcgcggcagagtcagcagccggcctcacacacccgcgccggaaaaccgagagcgccccacctcgatcagcttcttgcttcgcgcatcacttgcgttcagctcgagcggctcgtagccgcactccctcgcgacgaggtgggccatcgtcgtctttccaatgccgggcgaacccgagagcaagacggccttgtgcgtgccgatcgcgtacttgccgggccgcttgaaaccagatttgcggttgccgtccctagcggacgcggacggaacgtcagccgcctgctcaaccgagagtgcagcccagcagcagtgggaccgaccagttgccgagccagtccatcagcttctcgaccgtcgtcttgttgccgcaaatctgcgagagcgacgtcggcgcatactttgtcgtccagagctgcgagctcgccggcgggggcaccttgctggaggggtgggctctagcttcagtcggatggagggcaacgatggcccaaagagagggcggacgcacacgggagcagctggccgggctgcgaccgccggcttcttctcgctgctgcgactcccgctagcctcggcggccatgctctcctgctcgcgcgcctggcgctccttctcggcctgccgctcgagcttcagccgcttgcgatcggcctcgcgctcagcatcctccatctcctgcgcgacccgcttgatcttggcctcctcctccttggccttcttgcgctgcttgtcgtcgagcttgcccgacccgcggagccggatcaggtcgaggaaaccgtcctcgtcgatcgtcgggacattcttctcggcgatcttgcggagcttcgactcgccggcattggcgccgacgacgacatatgacgtgacgcccgacggcgcgccggtgacggtcctggggcacatagggaaggagagaagggtcagcctataggcacgagctgctacaagcggccatcgcagtcgcagcgctgcaggaaatgagggacccacccgccgtagcgcttcgcgagttcggtcgcctcctcgcgcgagaggctcgagagctcgccggtgaagacgaacttgaggccggccaggcagtttggctcgccgtcgggaatctcctttgaacccggagcggcgggcgcgctccctggcggcgggccctgcttctggcgcttgacccaggcggcttggctggcgagaggcggggcgcgatgatcagcaggcggttgagcgcgactggagggctcccaaaggggggggggacgcacgccgccttctgtgcctccgacttctccttctgcttcggtgcctcggccttcatctcgttccggatcttggcaaccatgtcctcgtccaggtcggcgccggccgtctgcttgccggccttggcctttggcagaggcgccttcttgcggggggcggccgaggccgagttcgaggacgaggcggctgcgttggaccggcctgccgccgacgacgagccagagcccttcttggtggacgagggcgcgggaatgaactcgatgtcgctgtccgagtcggagaggacgacgggcatcgtggcgaggagagggagaagggcgctgatgaaggtcgaagggtgcgggggtggagcggctcgaacgtcggtcggctcatcgacgcgtctcgccgtcgcccccttgagtacgcacgccgacagggtgcacctcgacagcttagcagtagcatagcaagcgagtctgacagaacgagagcatgcatgcgtgcgatatacgcggtggcagtcccgaccccatcaacgtctctccgcctccccccccgttcgcgctcagacccgcatgacggcgagccactcgtcgctctcctcgagcccggcaaactcgtacgcaaacgcctcctgggccctcagcgtcgggtccggcaggaggacgctgctcatcgccgcgctcagcgtcgggtcgagcggcgccgccgacgagggcgggggtgtttcggccgagcggagcgaggcgagatgggcgaggtaggcgggcgagtgggccggctgggacgggggcgcgatgtgcatcggtgggccggagaaccagaggaggctgccggttgtcgggtccgaagggaagcgagcggctgtcggcaaagcagaaccgttcatgggttcatcgtcaggtcttaagattcgcgcgagagaaagaaggagcagacgcacccgtcgcaggagggacgacggcctggctcgccgtctttgagacccagagcgcgccgcccgagttgccgacgacggaccggtcgagcgacttgcgcggcggaccgccttgctgcggcggcgcaggcctcgagccgctcgcgaccggctgggcggggtagggcctgccgccgctgcctgccgcgcctcccccggcggagccgtacgagggcatcgccggcgccggcatcgaccctggcgctgccgactggcgcctcgagagggccggcgatggcctctgcgaaccatagccagcctggctgcccgcgccagcaaggaccgacggcgtcgcgctccccgacccgccgggcgtcgcgcccgagagcccaagccccccggccggcccaccgccgccgctgtcgaggaccggcttgcgcttcttgtgcgaccggaccggtggcggcttgtcggcctgctcgcttttgcctccctcgccatccgacgagtcgtcgccgtcgccgcccgcgccgcccgccggccttttccgagtctctgggtagccgaggcagcccgggccagtgatgccccggaggaacggcgagatgcgcttgggcagcgtctggatggccgagaaggcggcgatcggcataaagtcggtcttgcggagctcctcggggatgcacgacgcccagttcttgattttgatcatctgccgctctttcgggttgtagcgcgattcgacgacgtctaacacggaaaaggaccgggggggggagacgtcagtgcccggcagtcactgagagtgcggcagtcactgagagtgcggcagtcactgagagtgcggcagtcaaagggacgaacagagcggccagcccgggtaccagtgcgggggctttggcctcccgcggaccgcctttgagtagaactgggcgccaaccttctcgaggacgtcggccaggagatgatcgccaaagtagcctgtcttgagaatttcgccctcccagaagatgcgcgaggccgggtggatcgtcccctctggccggaagtaccagcagacgctgacgctcgtctggccgacataggcacccttggttggcttgaacaccttgaagacctgaccgatgatcggctttgcgggctcatcggcgttggcgacgtggacgtagtcgcccgtgccaagcgtcatgcccttgtggtagccaacatcaacgtacgtccggtccttggccgacatccggaacgtcgcgaccgtgtcggccgagccgggaaagagcggccgccgggcgttgcccgggccgcccaggagcgacgagaagccggtcgcagcgctcgtcgagccggggttcgccgaggtcaggtcttggtagtagcgctgccgtgtggggcaagcgaaggaaagcaggcgagacggtcagcagccttcatggcgacccgacggacgcagaatgacgcacctgaaggacgaggatttcgccgtagccgccgctgccctcggtatgccaccgccgggccttttcaaacagccgtgtcatgtccttgtcaaaggcgtcggacgtcatgtactctgcggccgacacgcggctctcgatcagctcgagcgaaagggggccctgtgcgcgggcgcgcgagcaagcgcaaagagagacaagaggcgccgagagagcaggccggtcagcgtccgtcggcaagaattgaagggggtgagctcagccgcacctggaacgatagcagctcgttgtcggtctgcatcggtacctcctcgagcgcctcggccattctcctcccatcgggcccgacaaacgccttcaacttggccaacacctcctgatacgccgcctctccgccatcagagctccaccagccctgatcaacctcgaacccttcgatccgcgcaaggcgctcgtccatcgcccggacgacctcgtagaagccccgggccgactcgtcctggtccgagagggacggctcagacatcttagacggcgagggaggcgtgtacgtctcccaggggatcgagacgtcgatcggcttgctgctggcgacagagacggccggcagggccgcgacgggcgccggtgtcggcgtcggaggcggagggagcgttgccgcccgacctggaccgggcgtcccgcctccagcagcaggcgtcgaaccctcgcgctgctgaggcttattcttgatacgcggcggcttcttgacgtagccggcagcagcccgtgccgccgcctcttcctttgttggccggccgcgcttcttcgggagcattgcgagcgtcagggcgccccctggcggcgcgggcgatgcaggtgtcatcgaccgggcagcgccggcggcagcagcggccgagctacccgacgcgccagccgtattgctgatggaggccgccgcgccgccggcctttgaaggcgaggcattcgagggctccttcggagggaggatgccctcctcctcggccgtagcatatagctcgtggacgaggtcctggtccagagagaaaggaagcggaatcagtaaaaggagcgagcgatgaatccggagggcagcagaagggcccacgtcgagccgcttggcgtccttccagattgacgagtcgtcctcattgtctgtggcggcgggcgcatgatcgagctcgggcgtcagaattggcatgcagctgcaagcatctcaacgagcggctcgacacgtacagtgcatcgcattctggaagacgagctgagagcgaggaccgagcgaatgagccagccaagcattagcgcatgaaaggggaaagaggacgtgatcgggcgagacgggccacgcacctggaggtcgacgacgaacgcctgggccgagctaaactctttccggtcgagtttgttctgtgaggaaggccagccgtcagccgttcggtcgctcgcttgcggagggtagacgcgaccgacctcaacctcgtcgaggcagaccggctccgggatcgcctcgtagtagtctgggtagcgcttgcggtctggcagggcgtggaaatcttttgtcggcggcggcaaggggtagcgcgtcagcagccgtagaggccgggcgagggagtaaaggggatgagacggaccggtcgcgatcaggcggctgtagagggcgacggagggaggacgactcggggtcgaggtcagcttcccggcacgaggccgcatacgtgcgcgtctctctctcgccaggcaggcggactaacgggccctccttggcggcatagacggcgtccatgatggcgttgcactcctgtcggatcggagagcggcgatcagcaacaaagagcgcggaggcaggacgcgtcgggtcgtttagactcgccttgtgctctgcttcggtcaggggatggaagagctggcggccgggctcgttggccgtcatccgcttgaccggcgggagaggcgccatgacgtcagagcgagggatgaggggagggatgagaatgggtgagagagagagagggaggggcgtcagccctcttgctcccgtctgcgggctggctttggtgacaatcgccgacgacggctctgccgcacctggcggccctattctcgccccatctgctataattgggagctctcaaaaaagggtcaccctcccatcatctcctcccctgcccatcaaccatcaccaccccttgcccttctcaccgaccctccacgctcgcactagcacctcaactcgtcatcatgggactctttgatttgtgcgctgcaagcgcaacgacggcccgcccaccgaccgcgccgttcatcttccgtctgctccgggaaaacaatcctgacctcgctctgtcccatccttctccccttagcctcgaggtctccagcaaccagcaggccgcctatcaggtccagaacgaggagcacagtggtagctttggtcacgaggccatcgccggcgccgcgtcctttgctgccgtgcgggcttacaagcagcactgtgccgccaacggtcagccgcagaatcacgctctcgccctcgaaatcatcgccggcttcgcaggcgctgaggccgacaagctcatcgagacgaaaggtctgaacgaggtggacgcgattaaggtgagtgtctggcttcttgcggcgcagtccaccggcgaggggccttgctgacggtcgcctcctcgcctacgtcctcccttcttcaggccagacgtctcgccaagtcccaggctgcagaggctctccaccagtccggccagttccaagacgaacagggctactcgcggcacggcaactaccctgaggagcgctacggcggcggcggcggcggcggcggccggcgcgagtggggcggcgaggagcgcgaggttcgtcgcgctatctttcccgttcggtaatgaacgccaactgacgttccaaccatccctatctcaatccgtgcagcactatcagcagggcccgcctcgcttcgagggcagcggcggaggcggttggcaggacggccggggcgagggccatggctggggccgcagcgacgagtaccagggcggaggctactaaaagccaccatgaagaacgcctcctcctccatgcccgaacgtttgaacgagccttttcccgaacgctgtcaatgcacggagagagagcgagcagttcgtgcaagagaatcaaaggatgcggcctgcttcgggggaaacaggtcagcgccggcggtcccgttttcatgcccacctcgaccgcagacaagactggctctcttgaccctcttgctgctctcaggatcgatggtggtcgtcgacaggcaggaggaggcgggcgacagggcgaagcaggcgggcgcagcagcccagcgacctgcgcctcggccccccacaccttggctagccggccaccatctgactggatcgcccccagataagttttggcaacctctcctggattgtagaaacccaacggtaccggtctctctcgcaacaatcaatgagattctgtaaggaaggaagattttcggcccgcgcaggggctccctttcccgactcccctccggcccttttccggccgtccctgtgaccgaattgccggcagactagttttctgcatctctcctggtatcggccgaccagcctggcagagtcacgcgttgatctcataagattcggtaaactcgcatggaccccttgcctgggggcgacttgctgcgcgccgtcggaccgccggctcagtaatcggcccgtctcgttgctcctctctcttccctccctcgactactcaccaacacccaatcgagaaaccatctcagcatgaccccagcctatgtcaagctcgcgtccgagatcctccgcctctggcaggcctcgctcgaggccggcctgatcgctcatccgcgcgacgtatcctccggagcgcccgccgccgccgccgacctcaacggactcggccgccggcaggacccgtttggcgagccctttgccgaggggacgtttgtcggcaagctcgaaagcgacgaggctggagaggagggcctttacaatgtcgtcgtacgtcatcaggcttaaagggcttcgctgtcgactccatctcaaggccaggagctcgactcacccccctgtcggcttcccggatctccgatgtctccttctttcagctcctgcggcaccctcgaacggcctactcgttcgcgctcgccacgaaggaccctcatccgtcggccgagccagctcgggctccgttctacatccatgcccaccggctgctgcttgcggtcgaggacgcgctctcgccctcgggcgagaaaggggtggccgcgtttgacaagggcgccgacgccggcgacggaaacggcggacgcaagcgcttcatcttccactttgcctctgccgaacagcaggcctttggtgcgtgagattgacgagcagcccgcgccgccggtccaggccgctgacggtggactgttggcgccttgccagcgtcatctgcggtcaagtccgcggcccacgcgctgccatcgccctcgtcgctcgctgccgagttgcccgccctgctcgagcgcgcgctacccaaagccgacgagccgtacaacgcggtcttgaccgcgggcgagctcatcgttttcccgcgggccaagggccaggccggcatcatcgacggcgagcgcctcgacggcggcgcgctctacggcccattttgagttaaccaccccccccccaccgtcttgctctgaccctgcgtctcgatgagcgatgcctgccctatttgaaccgagtgataaggcgtgcatgcataagtcgtaaacaaggtcgttcggaagcgagggagatggattgaggtcgtgaggggaagaggggcagcgtgtaccgggcgagagcgaggtggcgaggtaccgttgcgaatggagggtagacacgttcgaaagagagatgagagccgtcatctcaggcgtcgccgctcatcggctggtcctcgcccgcgaggttgtcgcctgcgcctgcgctggcgtcgtccatcgccgcctcctgcgatggggtgtcgcgggcagccaccggcgtcgagtcggtctctttagccgcaggtcgccactcggcagtccgtgagcggcggagcaccttgcgccctccgtcggcagaggcgtcgatcgcccattggctgtggaccatcttgcggctcggtctgctgccgtccaccccggcgaccatccgacgcgagattgggcctgcgtcgcgctcggccgcgggctgctcggcatcccacgagcacagaccagagcccgaggggcgggtcgaagatgaggcagcggccgtcgcctgatacattgagccgccggcagcggagctcgaggccttgcggtcgaacgaaggcgaggcgttagtcgtcgcagccgggggaggcgcgtgcatgtagcctgagggcgaaaacgtctggccgtcgcgatgggcagcgaaatgttgtgcgccgccaccgggcgggccttgcgacgccgatgcagccgagtaacgctgtggtgtgatcggtgggtgactgctcgagcttgcactggcggcagcggcagcggtggccgagagcccggcggcggcaagcggcggcggcggaggcgggagggccgtcgggtgcgtcgtccaagggtagtctggatcgggactgctcaggtcgtcgctcgtgatccgctggcggcggactgacgaaccaccggcggtcggcgacgaaaaggtgtcgagcgtcatcgggtcctcgtgatcctcttgatactgtcggggctcgagccggttgctgcgctcccactcgggcgtgacgtaggcatcgagcgactcgtcgccggcgccgtcgtcccagccgcagtcgccaaagtcgacgacgtcaaagctgcaagggacggccgagaggttcttgctgtcagtctaggcgagagcgaatgggaccggagcgcgagcaaccagagacgcacactgttaggccgacccgattcgaagccgagacgaggtagcggcccgagaaggcaacctgccagacgccctggacgccagtgacaatgtcgcggacaaagctgccgtcccgaatgtcccacatcttgagcgtcccttcgcttccgctgataatcttggtctcgtcgtgctggaagcacgtgatggcgccgacgtgggcagtgagcgtctgcttgcactcgagcgtcgtcgcgtcccagaccttgatcgtgctgtcagccgcggccgagacgagggtgttgggcgagatgccgagcaagccgacgagtgagacgtggccttcgagcgttgcgagacagacgccagagacgaggtcccagatcttgacggtgccgctgcggcgagcgggaggaagaagcgtcagcagactgcaggcgatacggatccaatcggcgagcgagcgatcactcactccattgagccggaagcgacccggccgcgacgggtgtcgaggacgacactgtagactgcgggtcgaaaggcccgggcgtcagcacgagctcgtcaccggtcctcgaaagcatccgagagaagacgcacccttctgctggtggccccgcaggacgtgcaggcaggtcccgcggactatgtcccagacgcggaccgtgcagtcgtacgagcccgagacgcagtagcggccgtgggcggcgattgcccggacggcattcgtgtggccctcgaggcagtggttgtggaacggattctcgtgcggcgggacagggtcgtctgggttgcgcgggcggtaaggctggaaggaggctggtgagcagaggtcagcgagtcgaccgattagcgcaaaggagcgtgtcgagcgtcgtgagaacgcacgtgcgatcccttgttgctctccatcggccggaactcgggctcgcccttgcccggcaggcgccagacgcggatcgtgctgtcgcgcgagccagtcacgacgagcggatagggcgggagaaactcgccgttcggctgccgaaccggttcgacgatctggaggcagcgctggagggcaagcaggggcgccgggaggccgtcaatcagcgaggaacccaggagaatcacgtcgaggcaagaggcggacggacgacggtgcttgtgtgaccccagaagacgtgcgtctggatgcccttctcgatgctccagatgcggacggttcggtcggtgctgccgctgacgaggacgtcgccccggtactgaagcgcccagacgccgccttcgtggccgtcgagtcggcagcgtggcgcgccgtccttgatcgcatagacgttgatcgagtgctgcaagagcggagacggcgacaggcagagtcagcaagcggccctcgaggatattcattggccatcgccccgcgacgcacatcatccgaggccgagacaatcttgtcggtgtcaaattgaaggcaggtgacgacatgggcgccgtgacctggcggaaggcgagcgagtggatgaataagtcagccaaggcaccgcctgccgagggagaacggccagagggcggcgcaccgtgaaacataaagcgtttgccggccggcttcggccgcgtccagttcttgcgggtcatgtgccggatgcggtagacctgcttaagcgggtgacttcggcgcttgcggcgctcgtcgacggccatagccacctcggtcgccgtgctctggacggtcgcgtctgatgggaatgccgaggtcggcagcggccggccgaccgccgtcgtcgacgactcgtttggcgtccccgggagccgctcgtcccattcgcgccgggcagcctcgtcgagccggtcgcggacctcccagcgccggcggaccttctcctcctcctcctcttcggcgccgagcccccaccagaggccctcgtccttgagccgggcgacccagacgccccgctgacactcgaccatctcgtggcatgatctaggggtgggaatggacagcaagttgaaggtgctgaggggcgtgcagggcgttacgatgaagggaacagaaaggggatggacagcagacagcgatcagagggtgccgggctcggcgagctcctcgaccgaggggcactcgcagaagaggttcgagtcgccgtagactgcaggagggggagagagagggtcagcgacggtttcgcgcacagcagcagcaaggtcggaaggaagacgcaccatcgtcgatgcggccagtcgaaggccaaaacttctgctgccggagccagggcagcgggtaggcggcctcggcccgggtgtagggccgcgtccagttgggctcggtcatgatggcgaccgtgtggggcgcgtgcgagatgatgttgtcgtgcttgggctgcttgccgtcaatgacgagctggacctccttgcggatctggatcatggcgtcacagaagcggtcgatctcggcgaggccctcggactcggtcggctcgatcagcatgccggtcgagatcggccacgagcacgtcggcgggtgaatgccaaagtcctggagccgcttggcaaagtccatgaccttgaggccagcgagcgagtcgaattcggcgaggtcgaggaggagctcgtgcgcgacgcggcccttggagtttgagtagcgcagcttgtagtgcccatcgagccgcttggcaatgtagttggccgagaggatcgaaatcttggccgagtcggtgatgccgtcgccgccgagcatcttgatgaaggcccacgagatcgtaaggatcgaggccgagccccagggcgcggcagagatggcctcgatcggctggtcgccgcccgtcttgacgaccgggttcgacggcaggaagggcgcgaggtgcttgcggacgccgatcgggccgacgccgggcccgccgccgccgtgcgggatgccaaacgtcttgtggaggttgaggtggcagacgtcgccgccgcagacgaaagggttggtcaggcccatctgggcgttgaggttggcgccgtcgaggtagacctggccgccggcctggtggataatctcgcaagcctcctggacaccgtcctcaaagacgccgaacgtcgacgggtacgtcaccataaaggccgcgagcttgtccttgtactgctcggccttggcccggaggtcgggcatgtcgagctcgccgttggcgaggaccttgaccgggacaaccttgaggccggccatcgcggccgaggccgggttggtcccgtgggccgagacggggatcaggcagatgtcgcgatggccctggccggtcgactcgaggtaggccttgatgaccgagaggccggcaaactcgccctgggcgcccgagttgggctggagcgacatggcgtggaagccagtgatgacgcagaggtcgccctcgagctccttgatgagctgctggtagccctcggtctggtcgaggggcgcaaacgggtggatcgcgccaaagccgggcatcgtgagcggcaccattgaggcggtcgagttgagcttcatcgtgcacgagccgagcgggatcatcgcgtggacgagcgagaggtccttgctctggaggtggtaaatgtagcgcagcatctccgtctccgagtggtgggtgctgcgggtacgaagggcctgatcagcaagagagcgacgagagggctgacataaggggagacgcacttgaagactgggttagtcaagaatttggtcgtccgctggaggtcggccgggaggaagttgacagaagcgagcttctcagcctggagaccagcctcggccgccttggcgacgaggtcctgagccgagagggccttgccgccggccgcggtgacaaagacgtttgcgaggttgaggaggtcgatcaggccgacgctctcgtcgagcgtgatgccgacggccgagccgtcaatcttgcggaggttgatgccggcagcaaccgaagcggcatggagcttggccgcgccgaccgagtcggcgacctcgaccgtgagggtgtcgaaaaagtgggcgttgcggatcgtgtaggcgcccttgggctgggagagcaggatctccttgaggacgtgcgtcaggctgtggaccttggccgcaatcttgcggaggccctcgggcccgtggtagacggcgtacatggcggccatgttggcgagcagggcctgggccgtgcagatgtttgacgtcgccttttcgcgccggatgtgctgctcgcgagtctggagcgcgagccggtaggccttctcgccgttgctgccccggctgaggccgatcagccggccgggcatcttgcgcttgaggccgtcacggacggcaaagaaggcggcgtgcgggccaccgtagccggcggggacaccaaagcgggccgagctgccgaggacgatgtcggcgccccactcgccgggcggctgtcaggcggagggaacgaagtcagcgcatagctaagcaaaggtgcaggcaagaagacacaccttgagcatcgtcagcgcgagcaggtcggtcgcggccgtcacctggccgccgagctcatggaccttggccgtcagggccgcccagtccttgacgtcgccgtcgacgtcggggtactgaacgagcacgccacagaggtcctttgcgatcgccgcgtcggcgacgagctcggtcgggttgccgacaacgacgttgatgccgaagccctttgcgcgcatgcgcaggaccgagagcgtctgcgggaggacgccgtcggcgacgacgtacgtcttcttgttcttgaccgcgcccatcgacatgaccatcgctgtgggcgggcgagcgagatcagaggcgagtcagcgcgccggtcgaaaggaggcctgggacgctcgaggacgtaccctcagcggcggccgttccctcgtcgaggagcgaagcgttggcgtaggcgaggccggtgagcgaggtgaccatcgtctggtagttgatgagcgactcgagccggccctgggcaatctcgggctggtaaggcgtgtaggacgtgtaccaggccgggttctcggtgatctgcgggcggcggcgacggcaaatgaaagggtcagatcggaaggggacgcgcagcgggaaggcaagcaagcgcacgttgcggaggatgacgcccggaacgacagcctcgtggtagcccatgccgatgtacgacttgaagaccttgttcattccggcaatctcctttgcgcgcttgctaaactctgcgtcggaaaaggggacgatggtcgcgtccgagacggcggcgtcgccgatccggatcgaggccgggacagagtcgtcgatgaaggccgccatcgagtcatagccgaggacagagagcatcttggaggcctcgacggcgtcgggcccgatgtgccggtgagggtgcgtgtcgagcggggcgaagacgctggatggagcgaggcgcgagcgagcgaagcagggtcagctctctcgacggaggaggccgaagacggcggcggcgtagggcaaaaggggggacgcacgagtcggtcggcatgatgaacgagtggcccgtcttggtcgcgtaggcccgagcgagcgaggcaaaggctgccggcgaggcggtctgccgagcaggagcaggagcagcggccgacttgccagcggcaaggcggagggaggaggacgagccagacgtcgagccggcccgcgcggcggccgccgccgacagcctggaggagcgaagcatcggtcggtcggtcggacgaagggagggaaggggtaggagaaggggggcgaggttggttcgtgcgagagagaagggggatgtggttgggaaggcgagaacgggcccttctgccgtcgtcgcccaggtgaaaaaggctgccgtcgagccggaccgagtagcatggtcggtgccgcaccgaggtggcacgcacgcggtcagacgggacagcaggcgggcgccagagagcgtctctcggcgggacgccagccagaacaaacggcggtgcccttctctcgcaacggcgttgcacgtcaggtgcctgaggtcagcaggccccgaccagctgttccctccagcctgtgtcgcctcatacgagagcccactcttgacgaccccgcgtcgtcttgtcgtcgtcgtcgtcgtcgtctcgtcgctatcggaggtcagccccaggcgggatcgcccgcggccaaaggcgcagcagccgaaaaacgcaaccctccccgataaggccggccgggccgcctgcagacctcccttctttagcgcgagagcgacgccgtctgatcaaacgaggctctggctgctgaacggagaagcacatgcccatcctgttcgttttctcgctgcccagtcgatgccgacacttgctggtcgttgcgctcgcccccgcccgcccgctagaccgctcgctcgatcttgcgcgcggccaaagttgggcgaggccgccggggctcagtgggcaggcgcgcgacgcgtcggacgccgtgctgcaccacctcacactccctcgtcatgagcaggatctaagggaggatcacggtcgacaagcctggctggctgacagtcgatgacttgacacgcctggatcgagccggtcgaggagttcaagcgtcgttggccgcgttgggtcggtgacgtgtgcgcgggcgcccagcggtaaggcagagggcaaacgagcgacgccccttctcacagacacaatcgagtccctctgcaggcagcctcttctcaaggagacaacgcgcggcccagccccagcccagcggcacccgatgtccaaaagaaagggggtccatggcgaataattcagcccgatgcgtcgtcccatgccggacgatgctgggtcgagcgttctagaggaacgagggcgtgagccaatgcttgggtcgagcgtttctagaggaacgacgcgtagttgagccagagcctggccgagagaaaaagtagaaaggtaataatgcgtcagaggagctccacctcgcttggctagcgcccgccgccgccttctttctcgcaaaagggcacgcgtcgggaagtcccgaagagagaggacggacttctcgagcgagtccttgtgcttggccgagaaggacgtcagggcaggggcctttgtgtggctttttgagagcgcgtgcgcggtcggatcgtccgtcggtcatccgagccccgagaagagaaagggtgggtcagccgaaagtcctccgcggcggtggggatttggcggtcgaggatgggggaggagctcgtcgcccccttgattggacggggaagacgagcgcgagaggggggagggggatgggacgcacgcgaggaacgcctgcgggctcgcgtagtgctcgtagatccagaagcgctcgggctttccgaccgcgagggaaagaagggaagggcgagggtcagtttcgtgattgcgagcgcaggcggagggttcgaaaaaggagggaacgcgcaccttgtcgccgtcccgggcgacgtggtacttctcgacgccgtcctcctgccaggcgtgggtcagagagggaggggtgggtcagcacgacagctctgggtaggaccggatgcggagggtactgtgctggctcttgcgcgcaggcaggagcgagctcgggaagatgtgtgctagccctgcgtctgcctgcgagccgacgggcggctcgacgagatgggacggacggcctgtgcgaaggcgaagggggacgcgacgcgggcttgctcgctcgcccgggtcggcaagggctctctcagctggccgagcgtggcaggcagagctttggtcgcggcgtacgccgacagacaccgcacccgacggcgaaaagaacgagtggccaagcaagcaaccaggaggcggaggaagaaggggggggggacaaggggacagaaggtggaatgggcgcagaggcgcgccccaaagggaagagacaaggcggttggcggcgccaagcggagcttctcctggccagtgagaggagggtcgaacaagtgaagccactagttttaagcgacccagtcggcgatccctgcagagtcggtcaaacacgcgacacacgtcagcattgtcgatcatccttgcgacaagaggagaaggcggggaggacggacagctgaagccctggaactcggcctgctccttctggccgagcttggtgttgacgggcgtcaacgtcggctcctcgtttgtgaactctgcatcgaagtctggtgatggcggcgaggttgtcagcaagtgcgtagggcgattcagaggggccgaccggggtaacagacgcactggacgtgtcgagcgggtccgacaagcgggggaagtaggacggcgggatccgcttgtgatagacgtcgtcaaagttgacgtcggcgaagaacggctggcgcttgatctcgtcggcgtcggtctcgccgccgccgagccggcgggttgggtcccgctcgaggagctgcaagaaaggggcaaagtcagccctctgcgagcgcagtgtggtcgatagcgacagagacgacaaagggacgacaaagggaggaaggaacgcacgccctggaggagcttgacggcgctcgggtgcattgtgatcgggtaaagcggcggatcctcgaggatggcgtcaaagatctcatcctcgtcgtcgccgcggaagggcgactggcccagcagcatctcgtacgtcaggacgccaaacgcccaccagtcgaccgcgcgtgtgtacggccgctcgagcaggatctggaggccgctcagacatatcagcaagcagttcatatacgcgagcgaggcgcgttgagggaccgacctcaggggccataaactcgggcgtgccgcagaaggtggacgtcgtcttgccgaaccacatgtcctgcttgcagagaccgtagtcggcaaccttgatgtggccctcggttgtcagaaggatgttgtcgagcttgaggtcgctggtggcgtcaaagaaagaagacggtcagcagcggcagtcgcttgattagtggagagagagagagagaggaggacgcaccggtagatgatgccctttgcgtggaagtactcgagcgcaaggagaacctcacacgcgtaaaatttggcctgccgcacgctaaactgcttgcgctggatgtggagcatcaggtcgccgccgctgatgtactccatgacaaagtagatgcgcgtctcggtctggaagcacgagtggaggttgagcaggaacggatggccgcgcttgtcggccgccgcgaggaacacttgcttctccgatttagtgctgtcaacctcgtcattttcgatgatgaactccttcttgaggaccttgatcgcgtaaagcttggtcgacgtcttctcctcggcgagcatcaccttgccaaagttgcccttgccgaggaccgtcaggaagttgaagtcttcgagcccgatcttgccgccgcgccggacggctgcgatcggcggcggccggccggagacgacacctgctgctgctgccgggccgggcgctcctgacgacagggacggaggctgaataacgggcggcgatggccgctgctgcttctgctgctgctgcgggccgactgacgacggcggcacgcgctggttctggtgctgctgaagcgacggggcgaccatcggctgggcggctggcagtggccgaaccgacgatggcggagaagccgccgagccatgagggtcgtacggccgctgcggcggtccctgttgctgttgctgctgctgttgggggtagtgctgtggctgatgctgatgctgctgtgggaaggttggagcgagcgtgccgtgcccggccggtgtctgaggcagcggtcggtcccgcgacggctggcgctggtgctgctggtgctgctgctgtcggtcctgctcgacgtcgcgcccgaattggggcgagggcaccggctgcggctgcggcggcggcggtggcggtgggcgctggccgtcgaggttgagccggtcgagctggggcgcaagctgctgctgctgctgctgggggtggacatgcgcgtggccgtgctggtgctggtggtgcgacggcgacggcggcggaccggccatctgctgctgctgctggtgggtccgcttaccggctggcgagggcgccgccttcttctgcttgttgacatcgcggaccatgccgaggatgaggttggctttttcgggcgagatgccgcagaagttgggcaccaggtgggcgcaatgttcgtgacacgtgagcgagcattctggcggtcgggcggggcggcagaagaaggtagcgagttggtcagcgccgagccaagaggacggctcgctagggatagcaacgacggaccggagcatttccgggggatcttgcggccgagcgggaggaggaagccgcagtggcagcaccagtttgggctcaggttcgagtacgcctcgaatcggtgggggatgttgtggttgatcttgtcctcatcgccctcggcctcaacgttaggcttcgagatgcactttgtgaggactttggtgtagcagtgctcgtgacacatgtagcggcagtcgtcgcactggtagccgtcgcccgtgaccaagaacttgttgcagagcgcacagaggatgacctggaagaactggcgcttgacaaactggtggccgttcatctcgtggacctcgcccttgcgcttcttgacggctccttggcggccgagcccgccgagcgcgccgccgtccatcggccgccggcggaggttctccttgactgcgggcgaacgaggagaggcgtgcaggccagggtcagctcagaggaaaggggacgacttcgcttagcctgaagtcgcgcgacacgcaccaaagtcgaggtggaggttgacggcgcccatcggctcgaccgtgaaccaaccgtcgaggccatcgggcccctgctgcggcccggcactgcggccgttcggaccggccgtcgtctggtttgggccactcgagccgctgctactgctgccgccgaccgccaaggccgacgacgttccgccgatcggtccgagctgctgctgctgctggccgccgccaccgccgccgccccgagccgagacggtcgcagcggtgacccagcctgcagcatcaccgtcaaagccagcgtcaaccttctggcggcggagcgcctcgagcaggtccgagactttgagccacatgatgccgatcaggatcctcggcggcaggtcgccctttttcccgccggaaggctggtcgtagaacgccacctcgacctcgtccgccttgtccatctcgaggacaaagtcctgcatccaccgatcggtccggctcgcgtgcgaaaagtccttgacgacgccgtggaccttgaactcgaccgtcgtctcgttgaacggccgcgagcgcgaaaaggtgccagccgaggcgagcggggcgtgctcgagatcgcgcgcgcctttgagcgtcaggtagagcttgccagagacggccttgcggttgatcgcatccttgccgggcgtcgagacggctgtgcaggcgggcggcgagtcagcaaggcctgagaccggcagcgaaagggcaaaggacaatgcacgcaccctcgtcgacctcgtcctcgtcacacagcaggttcccatactttttggccgcctgcctcaacagcttgatcttgacgtcgctctccttctgatcggccagcaactttgccttctcgcgccggtcgtccttggccgtcgagttgacgagcatggccgccatcttttcgcgcccttgcttaaactggtcttcgagcttgagcttgaactcgagcttgttgagcatgtgcgagatgcgcgggaccgagaggggagtttcggcccggatgaggtctgcgcgcgcgtgaggccgccagtgaaggataggcgttcgccgccgtcagttttctggctgccggaaaagcaagcgcgcgatgaccagcaagcgagcgagcgagagtgagagagagagagagcgtaaagacgcaccgagctggttcgtccacttcttgccctcggcctcgggcgcgccctgcctcctcctcctcttcttcccgagctgactctccaagaacgccagcctctcctccgacgtctcgatcccaagctcagcctgcctgacgagcgcctggctctcgctcgaggcgtttgccgaccgccggtgggcggccgccatcgagcgcgaggcttggaggatctggcgctcaatgatgatgaagcgctcagtgtcgaggatcgaccggtcgagctttttgaggtcggccggggagggggggccgccaggagcatgagaccctgctgaggccggcggcggcggcaatggctgctgctgctgctgctgttggggtaaaggagacagggcaggaaggcaaggaagaggaggaggggagccgagatgggcagcccgggagagagggaagggaggaaagatgcgcgcccctggtcagctcgctgtatctatctcgcccttagaggagggtcgaaacctcttgcttctctcggacagaatgatgaatagagacgacggaccatgacttgagtttcgacgggagtcgtgacgccttggaccggacaagtgagaggaagaggatgggaggagagagagggagccggccttttgcgagaggcccgggcgggcgggcgtcgacggagaagggaggagacaaggaaaggagaggaaaggcgctgtgctttgttgcttgctggggcgggaggggtgagctgtgctcgtcttgttggcagtcttgttggctggctgtcggcagtctggctgagggatcttgctggctggcgcgcgcgaaggcaagacgaggcgggcgggcggggcttgcgcggcctccctctgctacagaccgcccaagagtgacctggcttgcttagggtagacgcacatgctagagctactctcgggcactcatgtccagccttagcttcgtccgagccagtcttgctagccttcctcctggtctgcgccctgcccatcgctcgctcgctcgctcgctcgcccgcctcctccctccgagcccggcggcggcggctgctgcgcgagagggctgagccgagggatgaccgcctgccctgactcgcgcccgtcaaccacccaccttcgctcctcctacatcacacccagcataacaccccacagatgcccgtcaagctcaccattgtctgtccctacattgctcgctcggtgtctcgcccacggacggcgcgggctgctcgtgcgactttagaagggaggctgacgccagtcttgccacacgtctcgactctcgctcgccttcgatcgaacctgccccgttggtcggtcgtcgcgacaataggtccgacacggcgagtcgaccggtccgtcgtccccttaacacctccttctcctcctcaccggcgtgctgccgcgaaaactgacgagagcaccttccgcccggaacccgcctagacaacctcgtttgtccctccgtccttcccccgctctccctccctgtcttgcctcgagagctcaccctccctcattcctccctgatgtgacgacagggctccgtctgggcaggctttaaagacgccccgctctcaaaccacggaatgaaccaagctaaagcggtcggcaaggccttcaaggatgtccacgtcgacaaggtgtatgcctcgcctttggtgcgtttgcgtcgtgcggttcttatgatggtaggttggagggtcagtaactgcgtcgcaccctcgcgcaaggctccaaaaagctgagactcactagagcgagaccgagatgctcgcattgtaaacgacgctgacccacgtatagcccgtcctcactccgatctgtccctcgtcgtaaacctcgcccaatttcaacccaaccgtcactgccgccagcaccggcttgacgaagcagtactggagtacgccgcgcttgagggcgaggtagctgtgtgggtcggagaggtcgagtgggtggaggaggagcgagagcgggaaggggtgtggggttggcgggcggagggaagagtggaggagggtgaggagcgagcggggaccgccgaggtagaggaggaggagggtgaagaaggtgtagatgacgaaggcctgtgggtcgaggggaggggacggaggctgtcagcgagattgcggagagggaagggagggtcggccgccggcgctcggtgggcgatgcagcagcctccctctcagtcccctcggagccactgcgagtagccgaccggatattgagcgtcgcgctccgatgccaggatagcggaggagcgcagaggtgggggctaaatcgtccactgaagcgcgacgcgaggtcgagggtcctcggagaaggccacgagagccccgcccgaagccgccccctttcttctcctgctcgaatgccggccagccctctcccttctagcatacacgggcggccagtgcgagcgggactggaaaagaaagcgaagcgagacgtcgggtcgggtcgcacctcgtagacgtcccgaacggcgtcgatgaagaaggcggcctggagcgaccagagtgaggcaaggctcgcgaccgcgtagatcggaatcatcactgccggcgtccctcctcttcgtcagcttggtcctgtcctgcagagaagagtcggggcaggaggaaaggagcgaagggaccgacgcatgatgcggatgacgagcctctgaaggcccggccgctggtagctgaagagatggcgcaagattgaccagagcgagatggtgaccgaggcgagcgtgcagccgacggccgtccagaggagggcggcgggcacacgctgctgctgctcctgctcggagttgttggaggagagcatgcgacgatggtcggtggtcggagagagagcaagagaggcaggcgagtctgctgccgtcgtcgcttcggagcgggcgagggcgcagcagcaaagtaacggcgagcatgtgagcagacaggccatccccttgtacctccagcactcgttgagagagaaatggaactcgttgtcctgtcgtgctgagttgcctcgaggtcaacgtgtcgagtgcctcttggtcttgcactcgcttctgctgccctgcctgctgctgctgcccgcctgccctctcctctgcgctctctccatctcagcccacgcgcgcgcgcgtctgtctccctctgctcgctctcggaacgcccaccactcgctccatcctctctcccttctcccacgtacgctcctcaagagcagacagcatggccgccgtctattcaaaggggaccaaagtctggtccgtcgacttctttgcctctcttctctggtcgtccgagtcggctcgtcggcggcggcggcaggcaggcggcacgcgcctctcaggtgagggcgtgagcaggccgtcgaccgctcgactcccccgaagtccctctctcctatatgcagatagtgggagacccgtcctgtgtagcgtgcactcgcgtcaactcgcctcatccacgagcgtcggcaagaggaccctggcgaagcgactcaaccccttcgagcgaaggagaaggacaacggggcgcacgcgccgcgcgtgtcttttgtccgaggccctgccctgctctccccatgctctggcagatggcccaggcgtcggagggacgctccctcctcgctcttcgcagctttccgtgccagcgctcaggcgttctcgggctctggccggctttggcgagtcgcctaagggggggaaggggaggtcgagccgagtgagctgaagcccggcaggcaggaggaggagcgccgacgttgggccttgacgagagcaacggctcggctcgtttgcctcttgggcttcttttcttaacgcctgagagccgatccgagagtgcctctcacagctaccttcttctcgtccaaaagcgtctatcgaccaaagccaatctgacgcctttcccccttctcgcatgcccccaggttcccggacaaagaccttggctggatctccggcgaggtgacagcgcgcgagacggtcgatggcggggcgggcgacggcagcggagagatggtcaagctcgactttgtcgacgagcagggcaaggcaagtcgttcttttctctacctggaagcgagggttggaaacggaccgacggaagatgtcttaccccccccccttcccgtctggatcctaccaggagcacaccttccccgtcccaacctcatccttaccctcctcctccacaggcgccgcctctctttccatctcttcctcctcctcgtccgccgccgccctcccgccgctgcgcaacccgcccctgcttgaggcccaggaggatctcgctaacctgtcgaacctaaacgagccgagcgtgctgcatgcgatccggacgcggtacgacatgcatctgccgtacacgtactctgggtgcgcctctctcgtactctccctccgccttccggtcgcgggcagacgatcgtgtccggtcggctaaccgccccctccccccttctcgacccgcctccagcatcgtcctcatcgccatcaaccccttctacccgctctcaatctacggccaagacatgatccagtcgtacgccttccgcaagaagggcgagctcgagccccacctctttgcgatcgccgaagaagccctcgactgcttgcgccgcggccagacgtccggcggcgtcgtcggcgcaagtgcggaccagacaattgtcgtcagtggagagagcggggcgggcaagacggtcagtgcgaaatacatcttgcgttatttcgcctcggtcgacgatccgagtcggccgacacgccgccagcggctcaagggccagcagcagccccaccagcaggcgtcggcggggccgacaacaatggcaggcggcggcgacgaggcgggtatgagcgaggtcgagcgccagatgctcgcgacgaacccgatcatggaggcgtttggaaacgcaaagacgacgcgaaacgacaattcgtcgcgcttcggcaagtacatggaggtccgtcgtctcctcttgccattcctttctccgccgtcccgcggccggcgctggcagactgataatgactttgcgccgccgcgctcgtcagatcctctttgacaaagaccaggagattgtcggcgcccgcatccggacgtaccttctcgagcgctcgcgaatcgtctaccagcccgagtcggagcgcaactaccacgtcttctaccagctctgtgcgggcgcgcccgccaacgagcgcaaggaactcggcctcggcgaggctgatagcgcccagtcgacgtttcactacctggcccagggcgggccgagcgcgagcccaatcgcaggcgtcgacgacgcggccgagtttgcccagacgcagaaggcgctgtcgaccgtcggcgtcgcggtcgagagccaatggcagattttccggcttctcgccgccctcctccatctcggcaacgtcgccatcagccaggcccggaccgacgccgttattgacgatggcgaccctgcgctcgtgcgcgcgaccgagctcctagggatccccgcggccgactttaaaaagtggacggtccgcaaacagctcgtcacgcggtccgagaagattgtgacgaacctctcggccgcgcaggcgacaaacgtccgtgactcggttgcgaaattcgtctatgcgtgcgtctgggagtacctcgttggggtcgtcaatgagagcctgctcggcgagtcggccggccgggcagagaaatttatcggcgtgctggatatctgtctgttgccctttccctctcgcttgaagaaacaagatgcaagagctgaacatcttcctccctactctcaagacggctttgagcacttcaagaagaactcgctcgagcagttctttatcaattacgccaacgagaagcgtccgtcctcgaggcttgcccccttccccaccctgaagagcagccggctgacacgttgcccatcgcccctcacagtccagcaggagttcaacgcccacgtcttcaagctcgagcaggaagagtacgtccgcgagcagatcaactggacgtttatcgatttcagcgacaaccagccgtgcatcgacgtcatcgagggcaagctcggcatcctggcgctcctcgacgaagaatcgcgcctcccggccggcgccgatggctcgttcgtccagaagctccatggccaactcgatcggcccgagacaaagggcgtgttcaagaagccgcggtttggcggaaattcgtttaccgtcgcgcattatgcggtcgacgtcgagtatgaggccgagggctttattgagaagaatcgcgacacggtcccggacgagcagctcgcgctcctccagggctcgacaaacgtctttctccgtaacgcgctcgaggctgtcctttcgccgccaccgccgccgccagcagcagcggcgaccgagcctccggcaggcgaggagcagacgacgacgacgccgccgccgccagccaataagcggcagtcgatcctcggcctgccggcctccggccggtcatccgccttcaacgcggccctcagccccgtaccctcggccctgaccgtgtcgaccagcaacaagaagcaaggtggccgcaagccgacgctcggctccatcttcaaaaactcgctcatctcgctcatggacaccattagcgcgacaaacgtccattacatccggtgcatcaagccgaacgagcgcaaggaggcctgggcgtgggacgcaccgcaggtgctcggccagcttcgggcgtgcggcgtgctcgagacgatccgcatctcgtgcgctggctacccgagccgctgggcatttgaggactttggcgagcggtcggtcccttccgctcgctctcgtgacgcatcaccggactgatccctctttgctgctgcttaaccgcagctactacatgctcatcaactctgagcactggcagaaggacctcaaggaggtctgcgcgctcatcctcgacgcgaccatcaccgaagacgacaagtaccaggtcggcctgacgaagatcttcttccggacgggcatgctcgccctgctcgaaggcctgcgggccgaccggctcaacgcgctcgtgacgctcgtccaaaagaacctcaagcggcgcgtcgcccgcaggcggtttgtcgcccagaaagcggctgccgtcagcgtccagagctggtggcgcggcagcgtggcacggcgcgaggtccaggcgatccggcgggagacggcggccgtcaagattcagaaggtcacccgaggctttgtccagcgccgggcttacctccgtcagcgcgattcggccgtcaagatccagagctgtgcgtgcggcgacagacggccgccatcgggcttttgtgctgacctccttccctcctcgcagccgtccggggttttcaggcgcgccgggcgttcaaggagcagcgcctgcagctggcggccaccgcgctccaaagcctctggagaggcctgtgcgtgcttgtcgcccttcgtaactcccttctcgcccatccctgacgtttcccactcccaccccccagcgggggcgacggggagggcgagggccggcagaacggggaggctcgagagaggggcatgcttgcctttctctgcctgcgagagacaagaggagctgcgactggccgacggaagaggggtggatgaggaaaagagacgagagacgacggctggaggaaggggagactgtgagcgttggcagagggcaggccggtcggtcatcctgccctgccccattttcacctctggccggagctggaagaagtccgcgcagctcctagagaggaggttggttgatcgacccgcgcctgtagaggtgagcgagcgactgaaggcagagcgtcacagagggggagagaggaggacggcttgacgcgaaggatgcctcaacagggggcctgccggacgggaccttgaccgcctgccgcgcctctcctcgccaaagagactgtcagccagagtaggagtcggtatttgcagctcgctagtcagtacggcctctcgacgacgagatgaaggtcaggagcttgcgggacgaacaggtcggagagaggagagcaagagatgcgcagcagccgcccgcctccccggcccaccctgccaggcctgccagttcgtcccgtccaaccctcatcctgtcttcccactccttctctcagccatctacaatgccgccttcgccagacaagctgtcgacctcggcagccgccgccagcagcacctctgctgccgtcgatgccgatctcaagtggggacgtggtacgtcaccgctcgggcgccctgggccctcgacgcgtcggccgcctgtcgccccctgctgaccttccctcctccctctgtcccctccttccagtgctcatcgcgggaggcgtcgactggtgagtccggctcatgctctgtgcggcgctctgccctgccatccatcttgtcttgagagagggctggcagggcggaggcgatgcctgtcgagctcggccttccgacgcgtcctgcgtcgcgtaaccgagcgtccgacctcctcctcctccatctcccctcgtcgattcgaacggcagtcccttcgaagccgcagttgacgctgagtttttcctctccaggcctgtcatcggcagacgctcgacgaaggccggccaagcgtccgagggtggggccgaggacctggcgagcccccacatcctccgctcgctgtcgaacgtcgacatggtctcgatccacagcgcgccgacggcctcgcactttgtctgcatcgaccgcgacggcggcgcctggctctttggccggaacgaggcttccaaccttggctcgtcgaccgacgctagcggtggggccaaggagggctacatccccgagacgtgcccgcgctatctgacgccgacccggctcggtcactcggacgccgagagccgcttcacgagtgccatcgtcggccgcagctttacgctcctcgtcacgaacgacggcgcgctctatgccgccggcgataacaaatgtggccagctaggtctctcgccaaaggccaagctcggcctcgccggcttcacccgcgtcgaaagctgcaagcacctcaacgtcatcggcggtgcggccggcggcagctttacgatcctcgtctgcgccgacggcaagacttatgccctcggctcgtccgagcacggccagacgggcaccggccggacgggcgagcacattgccagggccaacgtcgtcgcatttgaccttcactcggagccgacgctcatcggcggcgcgctcgccggccgaaacgtcgtccaggtctcgtgcgggacggcccactcggtcgcgctcgatgacgaggggctcatctacacctgggtgagttcccctctacagcctgacttctttgccgcgactgacgaatcctacccccgctttgcgctcagggcttcaatggctactgccggctcggactcggcgaccagaaggaccggctcgcgcccgtcgccgtcggccagtttgccaaggagaacaaggcgctgcgcgtcaagacggtcagctgcgggccggcgagcacaacggtcgtcgaccggatgggcatctactacctcgccggccgctggaagacgacgggcgacggcggcggcgggtcaccctactcgtccttcaagtacctccaagacatgggctcgtgcaaggtctttcagacggcttccggcggcgcgggacactttgcactcgcggaggaccattccgacaagagtttgacgctcagcatcgcctttggccagggcacgctccactctgagctcggcctcggcgagggcctaccaaaggcatcgacgaagccaatcaaggtcgagccgctcgacggcctggccatcatcgacgtcgccgccggccaggggacgacgctcttcctctgccggccgagcgacgtctacgccgagctgccgaggcacgagccgctcgagacggccgatgagtgctttgtctgtcagcaggtcgacgaccagcccgggctcgtttgcgacgtgcgttgctcgtctgcctcttgtgtgctgctgctctgccgtcggttgaccgctgcgtctccctctctcagttctgcgagaagccgttccacctcgcgtgcctgacgccggcgctcgatagccagcccaaagagccagagtggttttgcccggacgtgcgtcccccctcctcggcccttctgcgttcgagtctagcgtcagactgacgcctctcgctgtttgccctcccctccagcacaagacgcagcaggacctccagttgcttgagctcgtccacgaagccgagctcagcgccgtcggcagcggcaagaaggggaaagcatccgcggcggcgccggcgaagggcaagggcaagcgggcagcagcggctgagcctgcgggcaagggcaaggcgggcgttgctaagaagcggaggtgaggcggagatatcattgatgacacatcctcccttccccccctcttacgtgttgacgagctgcaggcggccatcttcgtcgaccgagagactgaggccggaaagctgggtgggggaggacgtcgctgccgagtcactcactcggcgttctcgcagacggcagatcaaaggactggaaggagaacgtacgacaccatcgcctcggttgcggcggacaaagatgatgggcagcgctccggttgcgggagccgtcgccgatggaggatagacggccgggatcggaggtgacgctggctcagaggcgtaggtcggcgcttcgagtgccgctgcagcggccgactcgtgctcgtgggggtcgtgcatctgatgctggtgctgctgggcgaaagcggcgagtcgatgctcgagggtcgggtcgatgagcgcgccgacgtcgtcctggtgctggtgctggtgctgccgttgctgggcctcgcgctcttgctcttggattgaggccatcgcagccgcgaccgcttggaggccgtcaagcgctgccgtcggcccgttgtggccgtcgaaagcggtcgaagggccagcttggggctggacctctccagattcgtgctgctgctgctgctgctgctgctgatagacatcggcgtcgatcgcttcaaagtcgacagaggaggacgacgcctcgtgcggcggcggcggatggtgatggtcgccctcgccgccattggcactgcggccgaggatgtgcgcgatgtcgactgccgacgggaggccaacgacgaggccaacctggccgccgcttgccgcgctctcaaacacgtcctcggcaaactggccgtcgtcgttcgtccgccggacctcgagcgggccgatcgaccccgcccagagctcgacgagcacgtcctggccaccggtgctgccgctgctgctgacggtcgcttgcgagtaggcgtcggcgaccgtcagctcgagcgtgtgaccgtcgggatggataaacgcgggctggatggtcggttcggctgcgatagagggcaaggggccgggtgcgggccagaggtggggcgcaggcacgggcgggaagcggaagtacgtcagggaggcggtgcctgcgtaatgcgggggagagcacagtgtcagatccagagaaggaggctgcggagagacccctgaacgcacaaacgctcccgatcgtgaagaggctaaagtcgtcgaccttgtccctcccagcagacgcgcccgactcgcccgagacaaacgtcactggtcggccctcggcgccgagcccgccgctaccggccggggggttgtcgaggtttggcgcacatgagaggtaccaccggggaggagtgctgttgctgctgctgccgtcggcggcggcgtctggtgggatgcttgacgcgggtcgacggaaggcgactttggagagctgaccgactgagccgccgttccttgccgccgccgccgctgccgctgctgaagacgaggttccggcctgtccgccgccgctggggtgcagctcgccctcgtcaaaggccagcatcggcagctgcgcctgctcaccgcccccggccgactcgtcaaagacgaccgacttgccctcgacccggcacaggacgagcggctcggtccgccagccgctctgcacctcgacaaggataacctcgtcgccgtaccagacccagccgtcgtcgtcggcggcctcgtcgttgcctcccccgtcgacagccgtcgcccggctgacacgctcgatcgtccatcggctccactcggtctcggtagacacgccgagccgtctcgtctctgctccgccgtcatcgaccgacgtcgcgttcatagacgcagaaggaaggaccgcaagcgacccctgcctcgtcgtctgcttgttgatccgagaatggaggaagaaggtcgagccgttcgcgagcgagccttcggccgtcggcgggcggtgtttgcctgtctttgagcgcttgggaggcttggagcggatcgagaggggctggctgacgagtgtcaggagggggtttgggacgggtaaaaggtttgaggggaggggaggaaggagggcggcttcggtggaggtcgtccgggcggacgtctagtcgaggcggggcgagcggcgaggcgtgtcagccgggggtttggacggggaaagagtgagggaagcaacagacctttatcctctttctcggccgagtaccctctgcctccgcctgctgcccacctttcgccatcgcactccccgcaccatcactcattccccttcccaccgccgtcgccgcgccaaattgagcgagctcgaccttgagccgccacgtgcagagccctgctgcgcctccgggcggctgcttacccttctgcttaccctttggccgaggagcaacgaccgcgggtggctcttcggcggaaggagcgatgtctgatgcagagggagcgtgcagtcggagcgtggggtcgagtgagtcgtcctctgcctcggcggcaacagcggcgtacgaatcgagcccgacgtcgtcggccatcgtcgtcgtcgacgacgatgggccgccgagcgtcgaagaaacggcgccggaagtttctcctcccgccgtggtcggcggaagcgcgttcatcggcggcccaccaatgtagaccgcgtcgaatgcggcgtgccctgaactcgccccgccgtccttgccgctgcttgggcccgatccgagagcatggacgtcgaggttgagccgccgacgctgcttggacgtcgtctgcgggccctcctgctgatgctggagatgctcacccgccagtcccctaggcgtatccatcgccgttgacaggactgccagccccaactcgcacacaaccttccccccggggggggggggggggagcaggagcgaggcgaggttcgggcgaggcgcagcgacccactgaatgccgaccctgtaccacgcacggcgtgcgccttttgagcggcttaaggctccagtttggcggcacaagagcgacagcgcgctcgtcgaccttttaacgaccgctggcctataaaacgtctcatcagcatggctccctcgtgccgctctcttcagcaggccctcttactggtggctgtgatcctggttgcgcgcatcgcctgccttcgccgggccctgcatccgccgaccagtctccaggatccgatatttactctcatcgcgcacagagcccgtttatgaggccactgaatgtctgctttgacgaaaagtccctctcagcacgcggatgagaacaaggtctcgctgtaccctcccgatcgcaagctgagccgagccgtcatcacatcggcacgagcccgccgagatcgacctgcagcttcttggccgtcgatacggcactgtcaatcatgccggcctggaggaaaagcccgacggcctcctcggcaagcaagatgtctgccgggtggcgcagggcgaggggaagggtcagcaggcgttgagcgcagcgaggtggggagcgggcaacgcactcgagtggaacgagttgggatagcgctcgacgagctgcagcgtcgagagcacgagctggtactcatgccggaggtcggcgaggtcgacaatctcgacatcgcgtgcgcgtgcggccgggctgaagagctcgtcggggatgttggccgttgtctttgtccgcttgcggcgctgtcgacgagcatgaaaggagaaggtgagcctgctggactaggactcgtggcaggaggtggagacgcaccttgcccgacgggtcgacagcgacgggcatcgcgagccaggcgtgcttcgggtcgacgagcgcgagcgcgttgatcgcgagcaggtacgactttgcgcgccgggcgctgatctcggcaaagggcccctgagcctcgctgaagcgccgggcctgggcgtagatggcgagggcggccgagcggtagtcgccccggtggatgtgccacgagtagaggaccatcgggtaggacgggaaggccatcgggtccgagtggcgggccttgaaggcgagcgtccgctcgacgacgtcctggaggccgacaaacgaaaactggacgaggcgcgcgacctggttggcgtggcacatgtgcgtgatcaggtgcgaaacggcgtcgttgatgctgtgagggaaggagtgtcagcgggctggcgacgagacagcacagcagacgggccccaagacgcacgtatcgcgatgagggttcgacgtgagcaccatgtaggcgtcctcgtaccggccgagattgagcgtcgccgcaaagagcctgctccagaggtccttcgtcggccgccggccgcaaaggatacgcgcgccagcattctccttgtcttcgtcgtcgacgtccatgcccgcgagcgcggccggcccggaagcagcagccgacgcgtcgtcgtcttcctcagccgcggctgcaatggcgaggttgcagaagcggatgatggcgccgtcgtgaacctggggcgcgtacaggagcgagacgtgccggtagtactctgtgcgcgaccacgcgctagcgacctttgccggaaggacagagcggagtggggcatccttggccgggaggtctgtagcgagggcaaatccgctcgacgcgtcagccgctggctggcttaaaggagagcaaggcaaacacgcaccaaagacggccgcagcgcgctcaaagagccggacgctcggctcgacctggccgagagcgagcgccgcccgggccttgacgtagccgttcccatcggcgtcgtcgtaccgctccgcgagctgggccgcgcgtgccggctggccgagcgcaagcacgcggctggcgagggcgagcgcgggcgagcggtcgatccctggcgcgctgagggcggaccacgagcgaaggacggccgaggcagtctggctgagcgagggcgagggcgagggcgagccgacggcgaggagagcggcgaggagcgaggggggagggaggagcgccgcttggttgccgccggccgacgagccgccgacctggagcccgctgaaccggttgacccactcggctgccgcagggagcgctccgactgccgccggcgcctgaggcccgacctcgacgctcgtctttgcgacccactccagcgccgccgcctcctgccacgtcctaaccgcgcgctcgagtgtccgaccgagctcaacgacggccgggtcgtcctctgctgtctgggcgccgacaccgccgaggacaagcacgagaccgagcgcgagccgctcgcgcgtggccgcgcattcgaggacggcagcgttggcgagagcggcgccgagggccgagagcgcccggggggcgtcgtcggctgcttcggggatgcctccaggcgtctcgccgaggagggcaaggagctccatcgccccgccagcgatggccctcacccccccgtggctggtgctgaggctttcgagcctcgccgccgtctgcggtgccaggccaggctcgcaccgcccaagccagacgtcaaggacggcgtcctcaaccgagaggccgccgagcggcgcctggccggcggcaaagcaaccgaggtcggaccggacagcgacgagtgaggggtaggggacggcgaggtcgacgccggtcccattgccgccgccgccggtgccgctgctgttggtcgtcccaacgaggtcgagcgcgagagagaggagcgtgctcgcgagtaccgacgaggccggggcgagtcgcccagtcgcaacagcgtcctctgccggtcctacccgctcgacagggacgagcagcccatccctcctcacaacgacccacgtcggctcccctccctccccttcctcctcctccgtctcgctaagcacaaccgcggtaagcgcccacctcgcacgttgctcgacctcctcgacgcgcgcgagaaagccgacccactcggccaagacagcctcgacgtgctcgcgcgccttgacggcgcccgtcagcgggtcaacggtcgcgcggtcgagctggcaagcgacgatcgagccgattcgggccggaagcgaggcgtacgacctgccgatcgccgagggcacgctgctattgttttcgttattgttgttgctgccggttgctgctgcggcctgccggccggcctgctgccggaccgagcgcgaggccgaagcggacgacagggcgaggacggtcgagatgtaaccctcgagcgcggccgtcagcgccgagagcgcatacctccccgggtaaaagaggtgctcgagaaagagccgcgagacatcctcggccgtcggcgtcgcgccgttgttctccgggtcctcggccggcgaagagaagacgagctcggcaaacgcgcttgccgtcgcgactggcgcgccgagtcccgtcgcctcgcgccatccgccctcatggcccggcgcgacgccggccgcaaacgcgcctgagcggccgtcggtgccaaagacgaggtcgagcgaaaagacggccgtctcgtgtcctggcggccgggaccaggccgaccagagccggacggtgccggaggatgaagggacaaggctgaaggctcgcagggccgaggacggcgcttgcggccgggcgtgggcggtcgagagcgtcaaggcggttgtggacgaggcggagcgggccgagtcgggtccagcgacggtcaggagcgggacaaggtcgggcgcgccgcccgggcgggtagagggccggacgccgaacagtagaaagcggccggggagatggatggccaggatatcgacgatgccgccggtgttggttgcgctgccggcggcgccgttcgagcggagggcgagtgccgagcttgaggtcggcgacgacgacggcgtccggccgagtagcctcaaccagccctcctcggccggtcccgccggcggcgcaggcaggagctcgcccgccggcaggtcgagctcggccggccggcccgccgtcccgctcaggacgttccatgcccggagccggccgtcggccgagagcgcaaacgcaagcggagggccttcgtacaccgagccgctgctgctgctgctgctgctgctggcaagctgtacaggagcgagagcgacgagcgagtgaaccgcagccgggccaaacaccgtcggatcgctcgcgccaaacgggatcaaggccgaaagcgacgaaaagacggagctcggccggctgaggaccgtctcgagccagcttgcgctcgaagcttgccagtcgagcttgagaagcgagcccgagcagaggccgacgagcatgcactcgtcgtcaatcgcggcgagggacgtcacttggccggttgacccggcggacgacgccgttggctcttggagggcggcaatggcagactcggtcgaccagctgcttccgacggcaaagtgcggcgtgtcgttgtcgtcgtcgtcatgctcgccttccatagcgtcgtcgccggctgctcctccgtggccggcatggtcgagccacgcaggccactcggcgaggcggcccgcgtccggcagcgtgaggcggtagaggaagcccgtctcggtcagacagaggacaacggtcgtcttgctcgagcggagcaggtggacgctcggcgggccgacaacgggcgcgggcagcgcgaagcggacgacgacggcggcgggcgggctcgaggacgacgaggccgcggaggaccgctgttgacggcgggagaggacgagcgacgagagctcgacaaccgagccgtcgtcgaccgtccggacgaggaccgagccgtcgctcgagctcgcagcggctgtcgcgagcgccgaagacgacgacggcgtgcgcgaggaggaagaggaggaggaggacgcggcgttggggtctgtcggctggacggggaaggttgggacggcggccggtggcgggtgaagggacgagagggccgtcgaggcgagcgcgtgggagcgcatgcttgtggtggtgcgacgaggcagagggcgagagaggagaggacggttgagcgggtcgagcaggcaggcgatgggcagcagcgcgtcggcctctcgctcgtttacggtttggtgtaactcggcctgcgtaactcgcggtcgagaggaatttcgactttggggctgcgctctggtagtgcgctgctgcgctctggctggcagctctgccattccaacccgccctgctgctcgccacccccttgaccaccctcgcctcctcccctaccctttctcacaacaccgccagccagcatgtccagcggtacaggcctcaaggccatcgcgcccgtcccttcggccgcagacttccttgacattgtgtgcgtcccaccctcctccctcgcctgctcgagagagagagagtgccctgccgggcccttggacacctcccggctcgcccttggcgacgacgctcggctcgagcgccggctgagcgaggcaaggcagtctagcttagcgggcactccgcgcgctctggtcctcttcccagggcgtgcaggttgccaagcgctctctcgaaccgagccccagtcgccaggaagccagctgcagcagcacggacccgaactgacccctcttatcctcttcgcctcctcgcagcctgtcgaagacgcagcgcaagacgccgaccgtcatccacaagaacttcaaggtccgtttctccgttccccccccccccccccctcgaagcggtccaagtacctcggtcgcaccgccacccctttcttccctctcgttctctctaccgccggcaccctctcccccgcctctgtccccctcttcgaccactggcgcgccctcatgccgtcgtacggtctcttctcccgcctcctctccctctcacttctccgggcgcgtgctcgctttttcgccttctaagttgcgctcccttcctctgcttccgtctcctcccctcgtctaactctcaaactcctcgcctcccgtccatagacccgcctttgtcattgcatgcccgttacaccctcaaactcctcgcctcccgtccatagacccgcctttgtcattgcatgcccgttacaccctaaccctaaaaagaaccccacgctcgagctgccatggccgagtcggccgacgcccagctcaaggtcgcctttgccaatgccgacgatcttgccgaggtcgaggacgatgtcgtccagccgacgtcgcagcgggcccggtgccagacggccttcgtcaagcgtcgcgagtccctcctggccgccctgccctcgactgaccgagctgtcgtcctcgacaacgcctcgcccatcgcccggcgctggatgtcggccatcccgttcgctgccaacctgcgtctgacgtcggccgaggtcgccgctggcctgtcgatccgcacgctctgccccggccaggacgaccactgctcgcattgctcgctgcccaacgtcgtcggccatgacgacgtttgctcggctcgcccgctctggcgtgtcgctcgccacgagcacgtcaaaggcttgctctcgcgtcatctcggctccattccccgtactcgcgtcgcgctcgagcctttcgtccctggctcccaccagcgcacggacttgcgcgtgaccggccctggctcgttcggcggtcctgtctccgagtacgacgttgccgtcgtgtctgcggcgaccctcgctggccgtgatccgatcggctctgccgacgtcgccggccttccgtcgtcgctgctgcctgctggtgtgtctgccgacgctgcgccgcgtactgcttgcgcctctggttctctcctcaaccaactcacttcaaccgagaaccagaagcgctcgaagtacgacggccggacgtcgtctcccttccacccgatcgtcatctcgaccggtggaactctttctccttcgactgttgccctctttgctcactggcggggccttatgccccgctatggtctcttctctcgcctcctctcgctctctctgctccgtgcccgtgctcgcttcttcgccttctaggcgaagccccttagccacttgaactccttctcgccttcaatgtaacaccgtctatagcgcctctgaccctctgctcccatcgcatgccccgttacaccctaaccctaaccccctcaatccctaccccaggtgtttgaccaaacattcccaacgcgccctgttagctcaatcggtagagcgtcagactcttaacacggtcgctcgaaagcgggtcaatctgaaggctgggggttcgacccccccatggggctaatgttcactttttgccacctgatcgccagatgcttattgggcatcctccggtaaggtgtctctcatgcgtcctcggccaaccggtatttgccggagctcagaactgaactcccgtcagccagcagcggtcgcgaacagaactcgacaggcttggctgaagaagcttatccgaggcggcggcgtccgcagatctcgctgaacgtcggcggcgccttcggctcctgtcgctgtgttgacgacctaagtgttccggcgtctgtttccaagacgacaggctgcatgtcgcactgcaatatccaacaacgtgagcaatgggccctaggggtagtgacccatttccgttgaccctccttctaaactcctcatcgtcattctttttcctcgctcttgttccttctccccgtgtcattacggcatcgagaatgtcctgcttgataacctgctcgtctcgcaggtacatcagtcgccgccgttctaaacaatttttgccctcattcggcagcatacccgactctgcccccaactcatcccaacaagggactcactctttgtctcgacgtcagcgacatccagccggcggtgagagaggcggccgagaacgagcaggttttatgcggctcgtcgtctgcagatttgccccttagtgtctgcttctcaaccagcttcgagcgactgacggtcgagatgtcgaaaaatgatcgggttccagcctgctcgcccttccttcccccttcctccttcctccctcgtcttgacttctcgctcagcgtcttccgactcgctacggccctctgaacccgagcgccccctaacctttactgccgatccatagccaaggctaagaccaagcaagtttaaacgcggggtagggcgtgccagtcgctcctgctctcgcgagaacgaacgccacctcctgccgaaccccgaaccccctcctcttgcagtgaacgtcggctcgattggtgattttacaattccctcggggcctaggctcttcggctcgccagcgaccgagctcgccgcccgtcccgtcgccaagggaccggcggcgagcatcagactatcgtccaaaccttgaaccgtagcctaaagccggcggccgaggccaatggcctccacttctcggccacaatttcttggaacgacctgcgccgtcccctctcaaagaagccgctcgccgccaaccatacccagcgagccgaccactttcgaagcttgcgcgacctcgacgctctgtctgacggcacccaggccgttctgtcagtcctcttgcccctgcgaagtgcttggaatcagttgagctgacggctatactgacctttgacccgcaagtaacatgacggaactgaggccagcatggttgtcatctttaattgccagccaatggccaaggaattggtgaagggcaataagcggtgggagccgccattttcattcgactgtccttgcccccctcaaggaccgtgacattcatcagcatcgactgccagcagctttatcctctcaccactgtcgccggttggcgggtgggggaccaaagggcacgaaacggtcgaaagtgacatgaatgaagcgctacgagaataagagtggggtgctggcggtcgcaggcgtaatggcaggagaaagacgacggggatcatccaaagcaagatggaaggagtacatgggcagagttcggcccggatcctgttcctgagaggaaaatatgaagacgcctgttacggtccgtacttggccacctgctcgaccatgacggatcgtatgcggtgcagttgtttccagcccacaccttagagccagggtacgtggccatgaccgagtgcttctttattcaatcgcggtcgggcgcgcaatatccacagcaaggggttggccagcgatgtcagcgggggccacaaaacaggacggtccttacggaagggactcactggcgaaaatagtctggctttcaagggtgaacagcgcacggagcgcgggtcctgatccagtcgagcaaaggggtcacgcgaggcgtcaattttcgcgacactcgctgccacgaccagctgtgagttgacgaccgcgctgtgacaaacaggaagaatggccttgggcaggcgcttgacgtcgaagggccggtgatacagactggttgggtcacgcagtcagaggtgacacagtcggacaaacataagtcggatgctgccagcggcgtcaaagacgatgtcctgctcggccaaaccaccattcgcaaaatcgagggcatctgcaagggaagacagaccgcttcgccgcaagtctctacctcgacaagcttgccgacttccgcacgccggctgaccgagtaagactgccggacggcacggatgcagagcttccgacgctcgacttcattcgacgtcgtcgaggataacatcccgcacagcgccctccacgttcagcccacagtcgagcacaaacacggtcgctcctttcgacgccgagatccccttcgtcggcgcttacacaggctcggtgtccgctgccgtcatcgccatcgcggccgagcagcggcgatcagatccagctgaccattgtcacagaagatcctctcagcaaaccagcaagtgacggctacctgccgagcaagcgccagccctttctagctgcctcttcattgtaaagtacagtatatatttttctttttggcgatctgcgtcaatctgccctatagctcagttggtagagcgttcgactgttatcatgcaatcgagaggtctacggttcaagcccgcatggggcagttacttttgcactctcgtgcggcgaggtttacaaatgggcagcaacaaaaacctttctgcgtcgaggtttttttaggattagcttgtaaccgtttttctcagaaagacaacgtctgagtatgtagagtgtcgcagcgtcggcagagccgcacctcgcagtcgtcaggtcaggctggcccaaggcattcaagaggacgggcgccaggcccagatcgtccgtctcgtcgtcgccggtttgttctccgccgtcgaatgcgcctcgtcgtcgttgctggctcacgagcttgagtagagcgccaatcatccgagactgcccttgtcgtcgaggcatcgtcgacgcgcgacgccgttgcgggctgcccaacatcaacagccgctggctggtaggtgcgttcgaggcttgggacggtgcgtatacctgagcttcggcccgcaaacgagaaaacgggcgcgctgacaagcgaggcggggacagtgattcggagtcgctgacgttgatggcctctcgccaggtaaggttgagctgcttctggcagtggcaacgacaagtcgggtcttcacgatcgcctcgcccgctccgccgacccgtcagtacttatccgagctagggtctggttgtggcatagcaagagccgctgcgagagggcaggccggttagcggaggccgatgccgagctcatgaggaaaactccgctctggtccgcaatctcgtcgagttggcacatgagtgtacacaggtttgttgtggcccctgaggttgaggccgcggacttggtggacacgccgcgaaaacccgcctcatctgtaggacgagacaggaggcagggccgactacagtgggggtgagctactgcctaggctaaaggggtgctagactagggggggcgaacgtacctcagtctcaggactactccgtgaacgactgagatataggagggggagcgagcggtcgtctagctaagaggagggagcgaaaagagagaggaggaaagagtccggcggactccagggcgtggcgcccgggtggccgctgggcggtcaccaggcgctggcggcgcgcccaggttcccgcgctgcgcccagccggtgccggcgcagcaacaccttcaacacctccccgcgacctctgtatcatcgccgcccggcgagacgcagcaggtcgccgtatcgatggtgtgctggcgcagcaagaggttttgtcagaccgtcgaccggcatctggtcggtcgatacgtaggtgattttgaagtggccgcgttcgacgcgctgtcggatccagtggtagatgacgtcgatgtgtttcgtgcgcgggtggtgcagcgggttacgcgcgagcgcgtttgccccttgattgtcgccgtaaagctcgagcacctcatcgtcctggctggcgccgccaactgggggggagaggagggcagggaaggggagagctgcgggtccgactgactccctgagtcccgaccctatgctcttggtctgcagcccaacatcacgtcgccgctcgcaaacaatcacgagcctggccaacctgctcagctgccagcctcttactctgtcaatcgacagcttaccttgctcaagtgcaccttcggtcgctgagaagtacgcctgccgccgccgccggtgcgccgactcagccgtgacgcgttgcacgccggctcctccccttcgaccatcagcatctccttcctcttgtcatgtcgtcggtcatcccgcaggcgctggccacagtcgcccacctccagaacacactcctggaaaggtcgcccgtcttcagtttgccgtggatggacatcgtgggcgtccctcgcctttccatcgcgctcgaccagctatttcgcctcctgaatcctgcaggccggccgtcgttcgttgccgaggtcggtttcgagtcgtcagactgagctgccatgcacgagctgatcttctggacgtggccccttctccaggtcttcacgatcctgacactaattttcgccggcgacctgctcgtgccggtgctctggccgtcgctgccgccgtcgatcctgctcacgagctcgacgccgtacctgctcttcaccgtcggtcacgccctatttacgcggacggccgtcaacaggatcgtcccaaaagaagctggcctcaagtgggagctcctggcagctatcccggacggtctggtgcgttctggctcgagggcaggtccctggggcgcagcggtcgctgaccctccccccccccccggccagacccgagcgatcgtcgtctgcaccttcctcgtcgacaatctcgtcaagcacgactcgctctccgagaactggtttgccctcgtcgcgctcacctgggtcgccgtctacggtggggcgattgtcgtcaacgccggctcgatgtggcggcgcgactgggccctgacgacgccgcccgagctccggcccagaggctggatgacgaccgacttatgggtgtacgtctcgcgtcgatggtccggctggacatgaagcagaggagctgacgcctcgtgccttactcctagtccgccggtctttgcgttcctctacctctacctgacgcggccgttcacctcgcccttgaccggttggctctaccagcgcctgtcgttcctctcggcgctcactctccctccggcgctgctcaagccgactcatcacgtcctgacgcagacagtcggcgagcaccgtatcgcctggacgagcgaggaggcacgcgcggccatcggcgccgccttggtcgtcatcttcctctgtcgtgcggcgtacaactatgggcaccagcttcggcggccgtcgaccagtagggtcaagaccgtcatcaaggatggcaagttcaagctcaagacgcagtgagggctctctccgatggagtctgttgcgatagatggggtctctcttgtactcgagttggtggtcgacgagcggggtgtgcagggcatcgtccctcgaagtcgggtgtcgaacaagcccctcgatttgtgctcgcctgagcaggcgccgtgtcttgagcagctagcgcaagtgcaagaagacaggcagacgtacggacggagcttcgagggccgtctgcggtcgcggctccgtgagctcgctcactcacctctcatccatcacctcccgcaacccccgccgccttcaagcccttcttcataacctcttgtgcgcttctcgcctgctgtggcgtctctcgccaagccgtctgtcagtcctcgttcaccctcggcgacttgcttggctcatagcccccttcctgtggcccgccagacctcgacctcaaccgacctcgcagccctccgatcatgtccttcgacgcacctgctggcgtcacgcgccccatcgtctttctcgacatccagattggcgagacagccgcagggcggatcaagattgagctcttctcggacgtcgtcgagcggtacgaccttcagtggcttggatggcgccgagccggatcgtaacgagctctcgtcgctgacgtcccagtctgtctggtcgctgcgtgctccgcccacccactcgctctctgtcaaacgcaggaccgcggagaactttcggcagctgtgtacgggcgagacaaggtgcgagcgagcagttgctcttgggccaagctctgcgaaggcgaaggcagctcgctcgctcgaggtcggggttcgccgagctgacagcaagatcatcctctctcacttcttcaaggatcaacaacctcccgcagggcttcaagaactccactttccaccggtgcgtccggttttgtgaggcctcgctgactggctggctgaacttgcgaccgtccgccttggcctctgtccctgcacctggaccccgcccctcccccagcgtcatcaaggacttcatgatccagggcggtgactttctcaagcacgacggcacgggctcgtggtcaatctacggtgagaagtttgccgacgagaacttcaccttcaagcacacccagccgggcctgctgtcgatggtgcgtcggcggcggcgagtggcgcttcgggatggatgcgagtggcatgctgactttgcgcaatgcggcgcaacgcggggcaacgcttgacctctcgttcggtcaggccaactcgggtccggacacgaacgggtgcgaccccttggcgtcgctcttgttgaacccatcgtcgagcccagcgcgctcacgcccgaccgcacccccccccctccctcgcagctgccaattcttcatcacgaccgagccggcagagttcctcgacggcaagcacaccgtctttggccgggtcatcggtccgtcccctgtgaatctctttgtgtgcataaacgactgacgttcagcgcggtcttgggcagacggcctcttgacggtccggaaggtcgagaacgtcccaacagggccgaacaaccggccgaagctcgtcgtcaagattgtcggtgcgtccgttttctcgtcctccctctctcgcatgaccgggctgacgtgatctgctctggccttgttgcagagtgcggcgagatgtagagcgctcaagtcctcgatcacatgggcctcctttctcgccttctccgctcaagcgtgaaagaagagcatgcatgctaagatggccccgccgaggcaggagagatcaatcaagggtggtagaaaaagggggcaggggtatgttctgcggtcctcgccgacgggctccggtcaatgctccttccatgcgtggccgctgcgacgcgccacgcgtccgctcgggggtgacggctcgctagaagactgcttcacgtgaagacaaatgagagagcgttgggggggaagtcagaaggggtgacgacggacaagccggctgagcgcgaggcggagcgaacctctcgtcgttccttcaagccaagcactgcgctccggctcagcggctcatttcgccggacggcttcacccggcttggccgtccctcttccgtctggccatccctcctccgccgacgcagggagcaggcgcatcctcgtctcccattattcggcgacatccatccagcacagatgcgtcggcgcctactcgtcgtccgactccgcctcagtcttctgcaaagcgcgagcgagcgacagcagggaagcaccgtcgtcagccagtcggctcttcgaacgtttcgagtgtgagagaggagggaggaaggagaagacgcacgaccgtccgctttttcttctttggcggcgagagctcgtcgtctgaggctggcgaggcgtccttcggcggcttctgcagatcaaagcaaggaaagagagtgagcgagcagccgagcgatgcaaaggagaacgacaggcacgcaccgcctttggcaccgacttccctgcccgtccgcctcgacccacacgcggcttgatgtcctcggcctcctcctcctccgtcgccgactctgcgagcgacttgcggccgcccgaccgcttaggacgcgccgacacgcgcggcttgacgtcctcctcctcgttgtcgtcatcgtcgctctcggccttcttcacgcgcctgccgctgctcaccttgcccttgcccttcccgcccttggcctttgacgccgatttcccgcgcgtcgccttccgcggcttgacgacgctctcgtcgtcctcgtcgctcgactgcgcagaggattcgtcgtcggaggaagagccggcggcagaagacgattcggccgcggatgagtcttcggcggaggactcttccttgacctacgagcgagtgggcgaaggggggggggggagcaagagcgtcgggtcagtcaaaggagacggccaatcaacctggatgggaagggacgcacccgcttgcgcttgctcgccgcttcgaccttcgccttcgccgccggcttcttcttcgccgctgccgccgccggcttccgctcctccttgacctccctgacactgggccccgccccggcattctcgtcctcatcctcctcgcccgtcatcggtccgagcgcctcgcgcaggcggacgacgaggacggctttcgcgcccgacttggggaggttgagcgcgccgagtttctctcggggcagagcagagcgggtagttgggtgtcaggggagtccgtgcgagccggctcgaaggacgacgagtaaggcgagcaggaggcagaggacaaggcaaaaggaacgacgcacatctttgagatcggccgacggcatgtcctcgagtgggtcgcggacgaccttctccggccgcgcgccgccaatgtcggcccggacgagcctgacaagctcgtccttgccgagccccttggactcgatctcacgctcggccgcgagcttccgaagctctccgaccgagaggctgtcgagtgggtcgtgcccgcgcgacatggcgtcgtcctcgctcacctttccctcttcccagagcgtctcgaaccgcttctggtcggacggcgggaggtcctcgaagccgtcgagctcggcgaccgagccgagctcggctttgaagttggcaatctgcttgggcgtgatgcattcaaagtgccgccactggaacgaggtgttgccgttgatctcgacgacggtgccgaagcggatctcgcccttctggatcttggtccctgcgggcgggggcgacgaagggcatgaaagggggagtcaggcggcggagcgttgtccgggaaggggatgacgaaccattgcacggcttggggcctgcaggaatagatagaaggggcatgcgcgcgtcagcaagatccgcctcggatgacgaccgggccggccggcgcgcgccttctggccggaagggttgagggaccaaaggaggcaagagagggaagcacggacccttgcaggcggcccggttcgagctcgagatctcgacgctgccgtcaaacggatggagcgtgtcgcgcggtcagcccgctgcggctgcgttagtgtcgggcggagggacagaccggtacggcatgctttgcttctgttgcgatggtgggccgtcgtcggcaggcaggcgggcaggcaggcaggaggacgacaagatgacgccggcgtaaccctaagtctcttcgtggcgacgctcgcttggccgggcctcccaccgttgtcatcgtcaaacgcccatcaactcaatatgcggtccgtccctgcacagcggatgctgctgctgctgctgctgccctgctcatcgaggaaggagggcgagaagagatggcggtcgaggaggacaaggccgacagtcggggcgcggacgcgctgcgctcggctcccgtcgagtaaacacttgcctccgacggggccgagcggccgtgcatgcacaggctgtctggcgctgagcgcttttcaagcgagagatgcccatgacagctgagcacgctacgagagtagctggaagcggaggcaaaggaagctggacgagatgactgcgaggagcgagaaagggtcagtcaggtgaaggacgccaaaaagagactgccccatgcgggcttgaaccgtagacctctcgattgctcagtaacagtcgaacgctctaccaactgagctatagggcactcgttattggccgattgtcaagcctaaatctataaatcattgtagaattctaaatagtcagaggatgcacactgcctgctccccttgcgctcactgcgacccgctcacctccggctgacacgcgatcgcaggcaacgcacttgtttacccgaccagcccaccgcagaccagttcagatgcgtcccgccagcggatgcagggcagagtgccggtcgcggcaaacgttgaagagcgagagaaaagggcatgtgtagcggccacgaaagcttgaccgcctgcccgcaagcagcaaagcgtccagtctgtcggcctaggcatccggcgcgctactcttcgatcgggaacaagtgcttggagaggatcttgttgagcgtgaacatctagccggccgaaagggcgggacggatccgtcgtcagccatcgagcgcgagacgattggcctgcgttggtagggagcagccgaggggaggggggacgtacgtgcacgcgcggcgtctggaagacggccgtcaggagcgggtcgccttcgcagatgatgtagcgccggtcggccgggtcctggcgcgcgaagcgaggtcagcttgggaagctgagaagcggaagaggccgatgcgcaacgaagggagaggtgacggacctgcagttccctcgccttgacatactcccagagtcgcttgaccgtctgcggccgcgaaagctggccagaaagaaagtgtcgaccggtcagcagctacccctcatgacgcgagctgcgcgagcggccgaacctgcatctcgcccgccatcagctgcgacagggccgggctgagcgccatctccttgttgaacgcgccacccctcggctgaccgctcgccgtcttggccgacttcttgccccgcgggcgctcgtcgtcgttgtcgtcgctgtcatcggacgagctgccggcccggcgcctacccttcccactcggctcagagtcgtccgagtcgacgaccctcgcctccgacttgaacttgcggcccgacgctgacgccgacgacttcttggccttcttgcttccgctcgccattgacgacgacgaggcgccacgcgtcggttgggcattgagctcgtccgacagccgctgggcgagcatcgcgtccgactcgggctcgcgctttgtcttgggcttcttgtccttctttggcttgtcgcgctttgaggaggtcgctagaggctggggaagcgacgagggcggtgggccggagggcgaggttgagaggggctggcggtaggttgaggaaggaggtggggcggaggagatgtcggccgaatctcggagttcgtcaaacagctcggcgatctggaagccatcaggcagtagtcaagggtgtggcatgtcagcccgaggagctcggggtccggccccctgacctagctgcgcaagacggcccgaccgagaggggcccgcagcgacagcgcagcgcggctgctgacgagcaagggggacggcgacacgcacgacctcgtcaatctcgcccttggccgcccggacctcggcctcgtcgagccgaggcttctcggcacagagccgctggcggacctgcttggccgagctggcggggcgggagacaggggggaggcgggaggaggcagagagggtcgagggcgtgcgggttagctttgatagcctgacttgagcagatcgacgtccgctcgatccatgcaccctccgaccagctgtccaagatctaggcggaagggaggctgctagcagcagaaggtggacgcacatcgtctcgaggtcggcagcggcgaggatggcgcggatgcgcggccggagggcgtcagcgtcgagctacggtgccggtggcaaagggaggtcagctcgagctcgaatgacggagcggcgtcgaccgagcaggcgactgactggcatgcttattgtctagtagcgagtgatgatggtcgagagggcaacgaggtcggccggagccaaagccgacctgccgccgagccgaaaggcgagcgagcgacgccacccctgctgcccctcgaaccctcacctaccaatacaccatgtccgccccgcagttgacgatgggcacgccccaggcagtcgctcttcatgcgaccgtccagaaggagctcgcacggctcgagtactcggacgacgaccccgtcatggccgaggtgcgccttccttcgtggcttctgctccttccctgcggcaaggccctgatctcctcgtgtgccatgctctcctcagtacatcaccgtcatgctcgccaacgcaaagaccaagcagatgattacggacgagctgctcgaccttatcggcgacggctttggtgcgtctgccacccttcgtcccctttgtcagggccgccgacgctgactctccgcttctcgcgtgcgcccgccagacccatcctttaccgactggctcttccgcacggctgctggcgacgaggagcccgctgctcctgttccggttgtcgccgaggacccgacgcccgccccgatcgccgaggctgcgccgccgccgtccagcagccccgccggctccagcgccggcctcgccatcgccggctcgtcctcgcgccctcgtcagccccagggcccgccaggcggcgcgctcttcagccgcgccctctcatccacctcaggtggcccgcccccaaccggcccgcgctcggccagcggcccgctctcgcgcaagcgcggggcagaggacgacctgctcggttcggccgccgacaagcgccgcgtctcgggcgccgccggggccgggcttgcgagcgagcgcggcgagtcgctgacgccgagagggccgaggtcgatgctcgaccgggtcggggccgagtcgccgtcatcagcggcagccggcggcggctcgcttctctccagactcggagcgaacggcggcggcggcgggaacggccagcagccgtcagccgcccagcaggacgccttccagcgcaagattgatgcgatgacggcctcgcagggcggggacctcctcggtccgtcgaccggcgcggcctcgctccctggccgaccgcagcagcaacagcagcggaacggcccgcgcgggcaacagcagcagcagcagcagcagcaggcgtttggcggcatgcagcagcagttccacccggggatgatgggcatgccgggcatggagatgatgggcatgggcggtatgggcatgggcggcatgggtctccaggagatgatggtgcgtcttaggccgtcccccccccctcacctccccctagtgctgacgcccaacgataactttgcttcgactcgcgtagatggcgcagatgcagcagatggcccagatgcagcagcagatggcccagatggcggccgagtcgcagcggcttcaacagcagcagcaagggcgccggcctccgccttcgaacggcggcccgcccaagtcggccaacgaacgtcggctcgacgccccttcaaacccggcctttgccccgccgccgccggtcatcccgctgccttcaaagccgacgtcgaccgagctctgcaagttttccgtcggctgcacgcaccctgcctgtccctattcgcacccctcgccagcggcaacttccgacctcgacgcgctcgtcctctcgaccgagccctgcccggcgatgctcgcgtgcgccgacgcagactgcacgctctcgcacgtctcggccagccagcggcccgagggcggcggcggcaaggccaaggtcgagtgcaagtttaagggcgagtgcacggggaggaaggacggaacgtgcgagtatgcgcaccggaacgaggcgggcgagcttgaggagggctccgggaagggcgtcggcaaggggctcgcgctcaaggagcggcttgcgggtatcaagccgatgagcagcggcgcgagtggaccggctgggataaccgagacgggcaaggcttgcaagtttggcgtgcgctgcacgcgaggtgcgtccccccccccccacttgtcactacccatcgactcccttgagactgactcccctctcaccccatcgtctcctgccgctccagccgactgcaagttctcacacccgcccggccgccagctgcccggaagcagcgcgagccgggccggcaccttctcaccctacgcccggccgcctccgtcgaccaagttcgcggcgccgccggcgcctgctgctgcgggtggcaatcggtcaatgttgttcaaccacgtcaacgccaagccgtttgagcctgtgcgtcctcctctcccgatcttacttgcgggagcctgaagctgacaaggcctggccctcttcttctcgtctgaagaaggacaagccgcacatgtcgacccgcttcgccgcccttagcgcggcgcaaggcggcgagaagatcctcccgtcggcgccgacgccagtcgtcgtcaacgcgcctgcgccggagggcgtcgcgagcgagctgccggcgggcgccgtccttgccgaggagtagggcgtcgggatggatggccgatgagatgatgtcgcattgctcgctctctcttgtttcgggttcgctggccggggaaagccgtctgtactggctgggcgtcgcttgagcggggtcgggcgtcgccgcaggaggccgacgcgagcggtggtggctgaagaggcgaatcggccggccgcggtttctcccgacggactcaacctcgtgagcagccgtccctccttcttgaacgacggccgaccgacaccatctcgccttcctcttctcctccataccatcacaccctatccaacacatttgcattaccatgaccgaccacgtcgagcagcagggcgaccacgtcgaggccttccccatcgccagccggacaaacggcagccacccggaccacccaaagccccatgtcggcccaggcctcgacgactatgccaagcttcacgcccagacggtcggcggcaaggagggcagcgacgactggtggcgcaaggtcagtttcctctctttctcctatggcttgacgtcgaggaggagcactgtgagacgggagacgagcgatggggcggtccggcaaggtctgccccaggagggctcgggtgtgcgcgcgcgctcggcgcgacaatccctccgagtcctccttgtctcccttgaacgcttggccttgttctggagcaggtcgctactcaggcgctgcctcctgcaacctggccgggcgagacgctccttctcgcccatctccatcgtcgccgacctcggcagtgcacgacctcccgcaccggggttccagcgggccgggccaatggctgacccgtcgactccatctctctctcgctcgctcccgcctcggtccctttctcccttcccacccgacctctcccgaccctcccaccagcgcacggacttgcgcgtgaccggccctggctcgttcggcggtcctgtctccgagtacgacgttgccgtcgtgtctgcggcgaccctcgctggccgtgatccgatcggctctgccgacgtcgccggccttccgtcgtcgctgctgcctgctggtgtctctgccgacgctgcgccgcgtactgcttgcgcctctggttctctcctcaaccaactcaccttcactgagaaccagaagcgctcgaagtacgacggccggacgtcgtctcccttccacccgatcgtcatctcgaccggtggaactctttctccttcgactgttgctctcttcgctcactggcggggccttatgccccgctatggtctcttctctcgcctcctctcgctctctctgctccgtgcccgtgctcgcttcttcgccgtctaggcgaagtttatcttctaggcgaagcccctcagccatcagaacttctcctcgcctcgtttgtctcctccgtccatagtgcctctgactctacgcctttttcatgctccgttacaccctaaccctattccctaaagggtcgatcttggtcagccgcaggttttgaatggcgcccagtcagtcccctgggtcagatcgaccgcccggctgctctgggtcagctggctcttggccgtcggcaccctttccagcgctggatgcgtcgaggggaggtcaccacgacgaatgggagtgggaagagcgtcgtagtagttttgcggcaggggtcgccagcgccggcgcgctgcagcgcccgcccgcgcggtggcggcggatgttagggttacgcttcatcgaacgtaacacgctttacctccctccatagcatcactctcctgcccttacggcttcctctccctcatagcgatttcagggcgcaagtcctcatgtatctcatgcgttcccccgactgccctgccccctgcagggccgtgtcattcgatatcccccgcctacagtgcctttgactccctgcgccaatcccacgctccgttacatcctaacttaaaagcccccctgtcccttcccctatccttctcaccatcccttgctccctgcgtcgttctctcatcctcctgtgcttccggtcatatcctgctcctccggggttgtgttcgctttgcttcccgtttgtacttgcctagtgtctgctgcgcctgatcgccgcggccgcacgtgtgcatgtggcaaggaagccaggcgtcagcatgccttggccgcgatttcgtccgccggcaaaaagttgactgcaaccatcaacatcaccttgccgaacgttctgcctcgcccccgcctttggtcgcctgtcccctttcggttcagtcgtcgctcatcgccgctctcgccggcccacgccgtctgcgctgcgggcttccctcgttcagctggctcctccgccatgccctggtcggccctccccatcgagatccaggacctcatccttgaggaggccatcggtcccgcgccatcgggataccagatctcccaagatctgcacagggccgtcaccaagagaagcgccatcgtagcatcactccgcttggtctgctctcggtgggacgtgagctcacgccaactcgaacgagcgctcgttggagcaaacgggccggctgacgaccttaggcgccttcctcccttcaccaggcattcgtcaagccgatcgcttactgctgggttatccagcagcttcagggtggcttcaagatcgacgatcttctgcgcaaagaggatctcttcagctccatcgcgcctctggtccggcacattagcattcccttccgcaattacagccgcaaattcgtggacactcctcttctcgagcaagcgcggcgcttcccgaagcttgaatcaatcaagtacgtggagtggccacaagacattgcagctgccggatcttctaggcctctcgaactcgaccacttcggcctcgtcttcgactacgacaacgacgaggagctcgacccgtacgaggacgacatggcgtctttcatcctcggcggcgtctcggaagttgtcaacctcgaccggcttcgctctctcgatctgaacaacgagacggagttgatccctgtcggtgacctcggcgctctcattgccaacattcccaagctcgagcaactcacgcttgctttctggtccactcaagtgtcgtccgacgagctctgcgccccgctgcgcgcggccagccagcaattgatcgtcctcaatctcatcatcctcgacgacacggaatatatgccgcacccggcctatactctcgattcgctgtcgcttccgcgcctcgagcggctcggcctcatgagaccaatccccctccccgaactaccgaggctgcgcgagatctctttcttcagcggctcctcgctcgacacctactcggtctccgagttgcttgactcggtcacccaactgctcgaagtcgtcggtccattctccaatgtccggacgattctcgagcgcctgcagctcaagccaaccgttacgacagacggcaaaattgacgtcgcattccaatgtttgcgcacaatcgtcctccccaggctcgacggcgaaatcatgctggagcacttcgagtttcatccgcacatccttgcgatcgccgctgcgctcacagaggtcgacatccaactcgtcggcttcgacggccgccgtgtacagcagcccgcatgagcaaaccttagcattcggccaaattgtctttgatccgcaggttgcccactcatccgcctccagtggcactgtatttgacctccgctgggtctcagggcgtctcccctcttgcgctgtcggcacgtccgctcggcgcactcaatctcatgcaacttcgttgcgcctgcgcgaccaaatgagctgaaaacgacatgtgagagtacaaaattggaatgaacggagaagaccgctccaccgcttgacagtcccgacgatggctagcaagcccgcacaagcaatcgacgctttgtttctgtcggcgtcagggccgtacttgcggaaccagtaagcgacctcgccgcctcgggccgcgtcgtgctatggaatgggatggaggcctcgaccgtctcgtacgtctgggcgagtgacgcctggaactcggtcgtgttcttgctgtagaagaaggactaaacgtcgcaatggcgctcggccgccgctgcttgagccttccatccaaggcgactggccggccgaaagcgagggcgcatccgcgggcgatggcaagtccggagtcgatttgcgctgggatataggacggaagagtaccacggcgacgtgcgcattggcggcggcgtgctgagagacggcgacagggtctgatgcgatggatgactctcggccgtcgaccgagtctttccccattatcggccgtgcccgagtcgcccaccgctgcctgcttggacgagcgctcgaccgctgcgccctcatctcgtggagggctctacccgatcggtgtcaaagcaacgaccgactcctctgccgaccgattccgcctgagccatgctcgaagatgacgccggacgaggttgagaaggtcaggtcggctgagtttggcctggaagaagcgacaaaagcgcccgcaagacgctcgagtgggtgtcgaggacgtcgatgagcttcgaacaaatgatgtcgcgctgagcagagatagtcgcggcatcagacaggggtgactagcaagagacgcacctgcttgacggtgagcgacatccgcgcaagctggtcgacttaactctcaacacggacacaggtctggccaaacgcggccagcccgagcgtctccttcaagcactcggatggtccgcggcgggccgcgagaggcttcgcgggcgcttttcgggagaagaggagcgcgcaagtcagcctaaagcagcacgaacggccgcaagccgtccccttttatgcgatgcgtctccctcctttctcttttggaacagcacccccgttgcgcagttcctcttcgcgaggacgacacacctgcccgaccgactcgccgaaccggcctcccctccaatgccagccgctcactcagccctctcgcctcttcttcccaacccaatcgaccgccaaaatcaagcttgaagcgtcgcttttgatagattcgaagcagagagaaaaccgaaggggtagagcagaggagggaaaaggatgtctagaggggaagaaagaaagccgacggggtggggcgagggacgtcaacccccctccgggcccggcccggccgggtgggtgcgcttctagaggatctgcgggcaagcgtccgtcggggagagggggtggttggaggtgaaaggaaaataaaggagagggcgacggtcgaccgatgccgaggcgaggagagggcgacagtcgaccgatgccgaggcgaggagaggacgagcgccctgttgcgcgagcggcgcgagtgagagggatgccgcacgccccggtcgtccggttggccgtctggtttgggttgaccggccgttttgtcgctcttgccggccgacacgccaaccgagcgaccagcgtcccccgcctgcccgcccgttctcgactgcgccccaaagtgcgcccccaccctatgccttctggtccctgacagaatgcatcgggatctccccggcggcctttgcccgcgcctcgctcgcctgctgactcttggccgacgagtagacgaggccggccaggaagccgacgaggaccgagccgaccgaggagaaggttgcggggtcgccgaagaagaggaagccggaggcagcaacggggagctctgccgacggcaaggcggggagaggggaagcgggggtcagctcgcgcgcggggaggagagggatgaggccggagggagagagcgcactgttgagggcgccgaccatcgagtaggtcgtcgacgacgtcacgcggatgcaccacgccgtcgtatacgagatgccgaccgtcgccgcgccgctaaacgccatcgcaaacagcaaaaagtacctgccctcctgcggaaagttcctcgcgagcgactcgctcccccagtcctcgaagaggatcgaggcaacgacgaggatcgggatcgagaggaggttgttgaagagcatgctgtcgaggtccttgaagccgaggagcttgatccggccgcgcatgtaaagcaggtagccggccgtcgcgaagcagttgagcgtcatccagacgtagccgacgagcgtgctcttctcctcgtccgagatggagccgctggcgggagagaggcgtaaggggtcagcgaggcgagctcttcaagtgcgacgacataggggggggggggctgacgttccggcgagcgtcttcgagagctcgggccaggcggcgatcaggctcgagacgaccatgagcccgaacgcgacgagcgtgagcctgctgagcgggctcttgaacacgacgagctcgccatacgccgtcaagatgatggccccattcttgaggaccgtataggccgggatcggcagattctggagcgactttgagccagagtagatgacggcgacgagcagggccgagacggggaaccacgctttcgcgtcggggacgttgaagtcgcggaaggtgaagacgccgagcgcacgggcggcgtagacggcgccgacgcagaccgccgactggatcgttaggaggaggaagttcatgtcgaagttggcgcccgagacgacaaacggggtacaggaaggaggggggggggggtgtcagccttcggcccccgccgcaagctggcgaatagggattggcacgcacagcaaacatctcaaggagagcctccttcggcatgaccacgcgctcgaacggctgcttctccttgacggccttcttggcgctatcctcaatttgcggccagtcggtcgggaggacgaccctggcgagcatgggcgacacgagcggagggtcagcaccaacaccttttaagagtcacgcaggccgccgccgaacgcactgctcgttctcgagccgcatgtcgtagaagaagccgtcgtcgatcggcgggccgtggccgaggcagcatccctggaggttcttctcgcaggcctcgccgaggacgtgggccgacgagtgccagaagacggccttggcctcgtcgtgcgcaaagtcgagaatctcgagcgagcacgactcttcgagcggccgggtcaggtcccagaggacgccgttgaccttggcgatgaccgccttctcagagagcggcttgttgatctcggcaatcagcttgatcggaatcgtctcatacgacgtgccctggtgcgtcgactggtcgggcatcgtaatcgtgatcggctcccgcggacgctctggcgcaacaggaacgacgtcggggagtcagcggcggatcctggcgtcggcgctgagggttgggaggaacgcacgggcaatgtcgtcggcgttctgcttcttccacttctcaaagagctccatacgagggccgatgaagacgttcggcgggtcgagctgcaggcagggacgagcgagcgagggcgtcagtccacgtcaagcgactctcgcgccatggactgctgcctgacctccttgccgccgccgccggggccggccttgggcttcttgggcttcttctcgcccgactgctgctgtttgacgtccttgaggacctccttgacgggcttagccttgacgtccttctcgacgacggcctgcttgacgtcggccgtattggcttcggcggcagcggcggcgacagctgggctaacggcggcgaccggggcgtcggccgcaggagggagggcggacgacatggcgcggaaagcgagaagctgcgaggaaggcgagagagtggacctagagaacgagaggaggggagatcgagagctgctgagcagacgtcgaagcatgcgcagatggtgagggaatcaggtcaaggcgaagcaaaggaggctcggccggctgccttgggcgtcgctcaggcggagggaggcggagttcgaaagctcaaatccggacccgggcgaggctcgagccgccttaggaccaacggcacgacaaggtggttgagacagctgggctggccggtagttgagaccgggctcgagactgaatcgtgcgaaaagtcgtcccatcgagccgagggtgcgagggtggtctggcgtcgtcggccgcctcatgaggctggctgcgcgcaggcgtccggccacgacggcggtcaccagcgagacgtcctcatcggagctcagactcgaccggttcgccgagcttgtgtctgatcggaagatcgcgccagctctcgctctttctcatagtgcccactccagatagagcgacagctgttggacgagctttgctctgcgcccgcgctggcctgcgcgggtaccgcaagaagctgcttggtcccgaacgcagccgtcgttgctccctccgaacgacgactcgttgaccgctaccgaccaccgatcacccctcgcgcaagtcttcgcagccaggccctcctcgctgcgatcgtgtccagcttgtcggatgacctggcacatcgacaaggagacgctgtcgtcggtgctcggcacggccagcatcgtctgctggtgagttccctcctgctcctgctcctcctgctcggcccgatgatagacgatctgctcctcctttccttcgaccggcgagctgattcgctctgttactacccctgctcctattcctctgctcgatacgacaggctcggcgcccagttccctcaggtcttccagaacagtgcgtccgcttgagctttgcaattcggacgcgacgccggctatcagctgactcttccgtcgcagtcaagaaccagaactgcgaggggctagccctcgtcttcctcatcagttgggccgccggagacctcaccaacctcattggctgctatttgacggaccagctccagttccaggtcagtcggcgcctcggctcgttgtcgagcgacgcaaggtcaggagactgcctgaccacctcgtcctgcaacgctgtccgccccctcagaaatatctcgccatctactttgtctttgtcgactcgaccctcctcgcccagttcttctactattctggccggacaccgaagaagccgccgatagcactcggagccgggcggacgccgtcgctgatggtcaactcgccgacggcctcgccccggcttcagacgctatccacctcgcgacctccacacaagcgccagccaacgcgggcgcataacagttacgacgagctctcgcacgctgcctcggccgttgcacgtgccgctgaagcgctcgcgagctcgcgcggccgccggagccggagtcggccaaagggcgtcaagcgcaagctcagcgctcgccggagcgacgacgaggatggcggcccggctggcgacagcgaccggcttgccgacagcacggcctcgctcacgtccgacacgagcgggacgtcgacgcgggcgatcggctcgcggacgtcgtcgtcgcatcagctgcgcgagtcattctcgtcgcagcagctggccgagctttcgcgcacgccctctcgcagccccgtctcgtcgccttcggaccttcggggtcggccgctgagcaggccagacggcactctcgagccaccgccagcagcgcccgttagctgttcgcccgataaccgggtctcgcgcatcgcgcttgtcaggggcgagagtcgcgtccggggcgtaagccgcgcacaacctggccgggcgaccgaagcaacggccggtctcgttctgctcagcctcgtcgcggtcgttggcattcggggtctgggtgggagtgggctggattcgagcttggtctcagcctcggcctctgaggctgcaggtcgcgtcgtgtggaccagcgatggccgctcggcactcgcccaacccaaagcagaggtcgttgctcttccggccttcccctcatacacttctctggagcccgtctttgtgatgggctcgcctcctgaccaccctgatcggccgaccggtccccatcatccctctcggccaccgccaacctggcagcgtacggtcggccgcgtctcggcctggacctgcaccgtcctctacttaacctcccggatgccccagatttggaagaatgtgagtcgttccgtattttttaaggcgtcttgtcgcacgatggctgactgcttcctcttcaccgcccgcagttcactcgcaagtcggtcgagggcctggcgatcctgctcttcgtctttgcctttgccggcaactcgttctatgttgcttcgatcctcgccaacccgctcatggacgagccccgaccgcggtcgaccgagtttatcctcgagagtctgccttacctcataggaaggtgcgaagcattcaaggctcattactacgcttagaagaagacccgctgacgctgcggccctgcatccttctttgcatcgcagcggcggcacgctctgctttgacatctgcatcgtcacgcaggcgctcgtctacggcggctcgaagcccgtgccggaagatgccgcccggccgtggcacccttctcacgggcaccggaaccgctcgcacacgcacacgagcggccgacaccgagccgagccgaccgacctcgagtcggcgccgctgctgtacgggagcgcgcacgaaggtgcctcttcgggcaccgtctcggccggtgggcccggcagcaagcgccagcggtcgacctcaaccggcgggtttggcgcgccgagtgggcctaggctgggaccggcccggtcgcggagtcggctgcgagttgcgggcgcggacgacgcgctcggcctcaagcttggcggcgactcggacaacggcggcggcggaggcaacgccgacggcgcaggcctgccagtcagcgggactggccagggcgcacctttcgacggtctgccgccttcgacgagggaacggctccggaccgtcagcggggtcggcgtcatcccggaggactcggaggcaggcctcctcttgccagccaagggtacggccgcccgagggtaaggatgcgaacgggagggacagggtcttttcctttccgccaatagatgagcagcgttgtatcggatcctcctcaatagctgctggtgtctgtcctgcagggccgacgggcggagtcggctggcggtcgaggaggcgctgcgcagcaggcccgcaggccatctcgcgaatcgtcgtttcgcgctgacgccgttgtggccgtaaccggatccaagcaggacgacgacggccctaccgaccaccacccgcctgtccctccttgccctcagcaccctgcccgctcgccatgtccgccatcgtcaccagcgagtttgtcgctgtcgacggcgtgaaccttcactaccgttcggccggcccggccaacgcgcccgtcgtcctcgccctccacgcgagcccttgctcgtcgttcgagtaccgaagccttgcccaagagcttggcgactcgtaccgcttcctcgcacctgacctgcccggctcgggcttcaccgaggtcggcgacggccggcgctacgagtacagctttgacgccctcagccggacgctcgaggccttcgtcgacgcactcggcatccagaagctttcgatcttcctccatggcagcagcggtcctgtcgggctccggtcagtgcgccttctgacaggtgaccgtcgccctcccgcatgctcgtgagaaagccgttgctgacccgtcgatctgccgtcctcatacgcagcctcgccctccgccggccgcagctcatccactcggtcatctcgcacaacgctcccatctcgatcgacggcctcggtccgttctgggaggagtcgggcctgcgctcgctctgggaggagcctacggcgacgaagtacaagcacctccaggccaagctctgcacgttcgaggctgtcaagctccaggtgtgtccggcgtcgtttgatggcaggatcagccacaggaactgaatttgcgtttcacgcggccgccagtacatgcacggcgaggtggccggcactgtcgcccacattccgcccgagacctacttcctcgactacgccctgctttcgcgcccaggcaaccacgcgatccagctgacgctcctgagcgacttcaagagcaacctaccgctctaccggagcttccagtggttcctccaggagcacgacatccccgtcctctgtgtctggggcaagaacgaccggatcgtcaactcgaccgccggcgtcgaggccttccggaaggcggccggcaacaaggcgcgcgtcttcctcgtcgacggcggccacatgacgctcgagacgcacaaggacgaagtcgttggccacgtccggcagttcctgacggcctacaagacggtcacctccccggtcgtctgaagcgagcgtcaggggggaggggagcgagcaaggaagggaggggagggcgggggggggggggaagaggtcagctgcgtcggctcccttcgcagatggggaggacggacctcgaccgtgcgcgacatatttgtcgagcgaaagtggagctggttcgcgtcgggcgaggacgagaggaacttgagcctacgcagggtaatcaaacgtcagcgatatgccatgagtgcgcatatgaaagggacgcactcgtcgacgtagagccgacggagctgctggccgagcgcaagggtcgactcgcggcccttgtcggtcagctcgccgagcagacattcgccctcctgcccgccgttgacacccttcggtacatcgacgagccttcggacgcgcaataggccctcgtccgccccaccgccgccggcgccgctcggctcgaggacggccgccgagaactggcggccgacatggcagaggttccagcgtgccgggaagtgggctggcatccggacccggacgggcgagcgctcaccgtgccgggcaaagacgtggacttgctggagcgtcaggttgggcgctgggaagaaggcggaggggatgaacgagtgggtcggggcccgatcggagggggccgacgctgaggcggccgtcgctagagtcggtgggagcgggctaccgccggtgctgctgctgctgctgctgctgctgccagccgagacgcccggcggaggcgagacggctggcagagctgggaccggcgtcgctgctgcagaggggttcggaggtgctgactgggaggccatcttggtgggcgggctgcttgctgaacgacgaggagatgggctgcgggtagggtcaagtgatgagaagacggtcagcccatcgaccgagaaagcggccgcagcatggtcgaccagaccgacctggctttggttcagtctctgtgcgactgctttcttgctgtatgcgggcgaggaggacgagccgagctgatggtcggacggcaggatggaccgagcctcgtcgcgtccgctctctggcgtcccgaccgtcaccgccctcgtaccgcatacagccccgccctccctcacgtctgcactccatggttgcctgaggacggcgaggctcctcctcctccttctcctctgcccagatgtcgttctcggacgacgacgagtttgacctcttgccgctgcccgacgtcgacctggccgcgctcgacctctcgtcctacaaggtcgtcccatcccagcagcagccttaccgcccgcctccggccgtcaagcgcgagcgaggcctgccgcctgctgaggaggagtgggacctcccgatccgcgtcggccacgacgggacatatggcctcaaggtctcgcccgtcaagggcacgtcggctcctccagcagcagcagcagctcgacctccgcctcctccagccgtcggtcagcagcagccgtcggccaacagcttccctgcctcacagcagcagcagcagcagcagcagcagcagcagcagcagcagcagatcccgctctcccaagtcgcagcgtcccgtcgtgccgctgcccttgcctacgccgccgcctcgaccaacgctggcgcgtcgtcctcgtcgagcagcacgcgcggtcaatccgcgccccctctcccgcccaaccgacccgtcggcggcttctcccagcggccgctcggcccaccagcgttcgctaccgctcgagcaggctcgatcggcccatccgtagcagcagcagctgcggctcggccgtcgcatcttggcttagcgccggctgcccggccgggtcgacgcgcaggcagcagaggcccaacgccgggaccaacaacgatggcgtcccgcggtccgagtcctgcaccggtagatgaccagcgcccagaggtcgacggcgacctcgctgcgctccgacggcagaacgaggtccgtcgaccgcgccctgcgcgagttcgcgctcggaagcgacgcgctgactgtcttttgtctgcttgctgcgcgctttcttatcccctctctcgtacaggagcttgtcaaggcgctgaaggagaaggagaatgcgtactttactgccaatggcgaggcctcgatgctccgccgccgaatggaggaggttggggtcttccttccgtccccgcctggctagtctgaggctgactcgctgcctcgcctcgcccctctcccaacgcaggccgacaagcacaaccgcgaagcgatcgaggcgctcaaggctcagcacgaggcggccgaggcgaagcggcgcaaaaaggaggaggagcgtcggattgacgaggaggcgcgaaagaccaaggcggtgctcgaggtgcgtcgccgctgctctcgctcgcagggtggggcgtcatcgcttcgggagctgacccttgcgagttcctccctccccttggcctcgactctagaaccacaacgccgcgacgtattcgatccggcggccgaccgccgctccgccctcttcgcacaactggggcacacagtctgtcctccgcccacgcactcggctatcccaaccccagtcatcgtcgcaacgccggtccggcccgctctttggccaggttgcacagacgcctgctcccgccggccgctcggcaggccgcgagatgattcttcgcagtggcggcagcaacagcggtagcggccgcggtggcagtcggagcgtcgagaagggctcgccgtcagccaaatcgcgcgaagcctacgcgcagagccctcggtcagcccgactccggcaagacgcagcggccctcgtccccccgccgcctccgcccgtgcccaagtttccaatgttccacaatacgtttgcgaagggcgcggcgggctcagcccaccatcggcgggcttcgtcgggcgtcaaggctggcctgggcgggctctacaagacgggctcgcagcagcgctcgccgtcgagggtgccggcgggagcagcggcggccagtgacgacgaacgggacgccaagaagcggcgattgttggacccgcggtcggacggcgtcggcgcagatggaggggaggaggaggaggaggaggaggaggagacgacgccaaaggcgagccagaagcagcgccagctgacaacgagctcgcccgtgcccgactcagacgaggtcgagggcggggctgaggccgcgatggacgttgacgaggagcctgaggacgcggtgcaggatacgccgctagaagacgatgacgacgatgccgaggactactggcggctcgaggagaaggatatcgtgcgtctcttgcgccctcctctctctgccgttcgatctcgggcgctgaccccttctcccgcttcagctcttcgccatcctttttaaccaccagatcgcgcccctctcacctccaacaccggtcaactcggccggcccgacccaactgaccgccccctcaccctcgacgcccatgtccctcgccgtcaagaacccaaccattcaagccgtcctcgcgccgctcgattcaacgacggccgcgaccgcgcgcgaccggacggagcatgcgcgggcgaacgcgaggatcctcggcgcgctgggcggggcggatatcgggcgtaatgcgggcgggggtagcgatctcgttgcggaagtgctcaagggcctgcaggcgatggctaagctctcggaacggctcaaccttgtgcgttccgcaagagctccctttttcgtcgagtgcaccaagctgactacgcctccaacgcagcttccactgctggcagacaccctgctcctgatccgatcgctcgtcctccatcttccgcgggccggccacgtcctcctccggctgccatccttcatttcgctcatcaccgccatcaaggaacggcacctgcccgtcgcggtcgccccgccgccgaaggccaagaagggcagcgctgcgatagcgccggcggcggacggtgatggcgctgaagacgttgcggccgccgccgacagcgacgggcgcgacgtcaaggtgcggttgacgcgggcgatgctcggcgtcgtcgaggtggtcgtctggcaagccgaagggcaagccgacgcagacatgtcggtcgctgctcgccccctcttcgccaggttgtcacccgtgctgacctttgttcctttccgccctccctcagccttggcacgctcatccaggttccgaagctcgtctcgtccctgctcgatcctgccgcgcagccaccagacgtcattgcccagacggtccgcatcctcaagctcatctccttctgtgcatcgcgtgcccttgcccaatccagcggtcctgcgcccgctgacttcgtgctgtgcctgctacagtcgagagcttgttccggccgctgctagcctttcccgatcacatcgcgcaggtccggggaagagatgcaacccgaatccctcttgtcgacctcctctgcaagctgctccgagaccctccagccggcctgcccgacgatcaggtccgtctctctccaccttcgcgtcttctcgtcacgctgactccgacacgcgcctaccagtcgctcgccatgtcgctcgacatcgtcgacatcttccgcacgctctgctacaagcacacggacgacgccgtcctcctcctcagccagcagcggtgcctcacgccgacgctcatcatctgcctcgaacaggcgtccaacgccgtctggggcgtcgacccaagcctcgacgagatgggccggtcagtctgcgtccagcccacggcatctctgccgaccctgcaaaacgctgactgcctgcgctccgccttctctccttcgcgcctcagatcgattccggggctcgtaccgatgctccagctcctgtcgctcctgacctcgcccgaagagcccgcgctcgcgcagacgcccaagctcgccgaccgactgcggtccgcgccaaagctcgatttccccgcggcctttgagcgcttcatggttgcgttcggtcggatctgctacgccgagatgcctgaccttgaggcgctcgcctcgtggggccctggtcgcgagcctgagggcagggagacgtggcggctctgggagggggagcttgagcgtgccggaggtacgtcggcaagcggcctgctccctttctgcgtccagcgctcatttctttctcgctccctactgggcagacattgcccgcgacatctttgatcaggtcgtcgaagggcccgagggcgacctcgtttacggcgtctttgtcctcgagcccgacgaggagaccgagtcgctcgcgtcgtcggccgtcgccaacgccggccacgagcaccctcaccatcacgccgacgatgaaaatggcgccccaccgccttcgtcccagccgctcgggccgctcatgcccgaagagggcgagatggccgagggcgttgcaggcgtcagacgaagcggcaacggcggtggcggcggcggcggcgacgacgacagcgagaccgaggacgacgaaccgatcgcgctgccggccctcctaccctcaagcagggcggccgcccccactgccggctcagcctcgcagatccgcaagagcggccggatcaaggcgcgcgccgtcccacggcaggaggtcgtcaagccgccgtcaaagcggccggtcgaggtcgtcgagctgagcgacagtgactgagttcgagagcatgttcagtatgtctcactcaacctagggcaagagaggggagaggcattcgagcatcgggcagaggctgacgggaaggggggaggtatctcggggacgggacgggccccttccccccccccccccccccttcccccgttcgctttgcgttcttgccactgatgacgctcctcctccttcgcgaccgcagtcgaactagcatctccagacggcgtcagcaccagcgcccttgacttcttcgacgccgacgcgcagacgatggccgactcggccggctggtggcgcgaggcgctcgaaaaatggtggagtgtcggctcgacggccaaccggaaggccatgtacgttccgggccggcgggtccgatgacagtgcaaaaggcggcattcaggggcggtcatggtcgttaaggggaaagtaagggaagctacaagagggctcggaggtgagagaagcgaagcgtccggcggcgagcacaggggagaggcaaaggggaacaggttggcgcgaaagaaaagaagaagtcgtaaggggaaagaagggaggaccgagcagtgctcatcacctcggtcgtctagcgcgaggccacacgctcgcgccgggcagcacccgagtctgtcaagagaaatggaggacaggtcgtcagtcagcatacggtttgcttcgacaagggtttagcagacgcacggcgtccagcagcatacgacccaaacaggtgcgccgcatccgaggcccccgggccgagctcgagtcgtcctaccataaggtcaattccttccaggtggagagcgacacaaaggcaaaagcagcgcaccttttgcccgcggatcgaccctcggaggactggccccgcgcccagccgcgaacgctcgtcaaacggcgcgtcgcggccgtagcggatgccggacggcggggtccgtctggaggaggatagcagctgtgtgtgcgagccttgcgtagcagaattgggggggggatcaaatgctcagcctcgcggaacgtctacggcgatggaggaaggatgaaacagactgctgtgagacggcattgtggctcgcgcccttgacgcgccgaccgacgttctggccgttggtgacgagcgtgccagagtaggccggcacgcccttgtcggccgcggctgctttgtagacccaagtcaagacgccggccggcttgaggctgagtactacaagcaagcggaagggggggggggaggtcaagggcgtgcaaggggcgtcggcggagaaaagaaggagaaggaccgatacggaggtcgtcgagccgctcgcggccagccttgccgtcgacgaggtacggccggtccggcgcaacgtcccagtctgacggaaacgcttcgtcctgcgcggcaaaggagggggggaggtcgctgctgctgcccctgttgcgttcgagtgccaagggcatgtagaaggttgtccgctggaggccgacgacgtccttgacgagcggctgttagagctcgccaagccacatccgacagacggcatcgcctcgcgacgcacagacggcgccgacaaacgcctcgaacaggtcaccgctcatgggcgacccgctcaaagccgttctgcctcgcgcacgctcgcctaccggacgcggaagacgtggtcggccgggccgacgagcagcagcaggaccgagagggtcgatgcgtcgcgtatggcgagcaggcggacgaactcaggctgggcgaggagcacgccggagttgaggaggggcatggctggagagggggcggaggcggaggcgggctgatgttgaggaggacaggggagggtagtcgaacggcaagacagacgtcggctggccccagggtcgttgtcggagagaatactcgatcaggcaggaggggcgagggagcggaagccaacaggagcgacgcgtcgacagctcggtcggttgggctgctgcgcgcgcccggattgcctgtcgctcgccgactcgatgccatcaaatctcatctctctctcgactctcaagcatgctgcttggggtagagtaggttgcaggaaaggtgcgactgcgattgctacggctaggtgtgctaagaaagctccaaggaggctagccctgcactacctgagagacgagggacgaggcaggcaagcgtcgcgcgccatctcgctcgcggcccgggtcgtctcggctagggtcatcggcataaggcagaggaatctgcaggatctgcaggaggcggttgtgaagaggaaaagagcaggaggcgagaggggagagggaggggggggcaggaggacgagcggttgtcagcctcgggtccaagagaaaagaggccgaccgccggcgacgcacccctttgtcggcccttcgaagcgcgctcagcgacgcttcttgccgccctttgcgttgtagcggctctttgactgccttggcttgtcgggcgtaaagtaagggaagcggaagccgctcaggagcatcctcgcccgccatttggcgccgacgccgcgctggttggtgataaagttaatgttgaagccggggagctttgggtagacgccgagagcggcctcgacctgggggaacagcggcaggacggccgtctcaaagccaaacgagacgacgccggccgtctcgtcgcccgacgtcgggtcgggcttggtccccgccggctggagcgggacgcccggccagtcgcgaatccgggggaagacgaattcggtcagagactcgatgaagcggtacatgtcgtggcccttgagcgtgactttggcgccgaccggcatgcccgaccggagatgccaggtcgccgcgccctttttgcccttgatgatctcgaccccggccttggatcgatcgttgccgccctgcttgacctggcccgtcaccgtccgcaacgcatggatcgccggcaggagcgccgacttgcgggcgatcgcatccttgacaaacgtcgagacgacgacggcctcgagccgggggacgttgagctcgttgacggcgtgccggacggggacgtaggccgctcttgcgcctggcgcccgcgggtgcggcctgtttgcggcaaagctgctcgacgggtccttctcgagccacgagaggttggcctggggtaggtccgggtcgatcgcaagccggtgcgagtagttgaggtagaggaggtcgtcggcgagtgcgtgctggtagtggtcccgcagccggttgggcgcgagctcgccgaggaccagctcaggatcgtctgcagcagcagcacgcgcctttggcttggtcgtcggcggcggcacgtccttgcgagcaaggacgggtgcggtcgagctgaaggcccggcgggacgtgctgcgtgcggaagaggcggtcttgctgcccgaggcgacaggcgagaagggcgccgagctcgggagcagcgacggcaggcgtgcggcgagtcgtttggcggccatggcgggcgagcgagtgtatgcgcaggggtcgaagggatggcttggatgcgggtcgtctgccttggctggctcgagcggctcgtcctggctggctggctcgcccgcccgcccttttccccaccctttaattttattttcatagcggcgcgcagaagacactcgctcgccacgccagaacttgagcccgtcactcccgcacgcacacccatggtccgctcctacctccggcacgagcccacgcaggcctttggcctgattgcctcgtctcaggcaaacagcgcctatgacggacagctcgcaattgtgcccgccctcgaggatgtcctcgtttggcacgtcaagacggcccagcttgtgcgtgccctctccttgcctttgtccgatgacattgtctgtcgctgacacccgacacttctcacctgcctggctactgcaggtctcgatgtggcactcgcccggccatacctcgcccgtcactcagctcgcacccgcctcggcctcatcctccgcgccctcgagctcgaccgcgccgccctcgtcgctctacgccgtcggctatcacgacggctcgcttcggctctggtcgtttgccttgccggcctcggccgcagcagcgacgcagcagcgcgaggcggccgaggtcgtctgcttcaacggccacaagaaggctgtcactgcccttggctgggacgccgacgccagccgggtcgcgagcggcggaacagagggcgagatcgtcgtctgggacgtcggcgaggagcgtggtctcgtccggtgcggtcccggccctacttcatctctctatgcttgggctgccagaagggtttgctgacccctctactcttgaccgcgctgcagccttcactcgcaccgctcggccgtcacctcgctccactttatcccgcatccaacgatcgcctcgcacccaggctacctgctctcgacctcgctcgacacactcctcaagctctgggaccttcagacggcccactgcatccagacggtcgtcgcccaccgcgcggccgtcgcgagctcacacatgcgcttcgtccccggcctcgctgaggacgccgccgctgaggtcgcctttgacgaggaaggcgaggaggtcgtcctcggcgccgccggcaaatgggaggtcgtgagctcgtcgaacgagggcgaggtcaaaggttgggagatcagcgagcatgcgctcgttgctggcctgcgcgagacggccgagggcgagctcccgtcgtttgtcgagccgctcgcgagcctgcctctgccgagctcgagcagcccgatcgcccatatccgcttccacccaacggcaccgctcctgtttatcctgacgtccgacaagacgctctcgatcctccggatccggaccgcggccgagattgagaagaagaaggcccgccggacaaagcgcgcaaaggagaagcgaaaggaggagagcggcgccgagccggccgccgacgaggccgccgagaaggagtatggctggggcgagcgtttcgcgctctggacccaggtgcacggcggggccaagatcaagtcctttgcgttcccttcgtcgtcgtcgtcggtcggccagccgggcgagtcgtctggctcggcagcagcgtcggtcaagccgacggtcaacgtcctcctccacctgacgaccaacacgctcgagtcgcacgcgatcccgctcccgccgtcgggcgcccggccgcccaagacggccgacccggtcgagccaaagcggctcgcggccgtcgaggttcagggccacaggtcggacgtccgcgcgctcgacgtctcggcgggggacgacatgctcgcgagcgggagcaacggtcaggtcaaagtctggaacctaaagagcctggcttgcatccggacgatggacgccggttacgtcgtctgcctgagctggctcccgggcgaccggcatgtgcgtccccttccgttgactcagtgacaagcggcctcgcatctctcgtgctgaacgtgctcctccccctccctccagatcgtcgtcggcacaaaggacggccggctctcgctctacgacgtctcgtcctcgacgctcgtctctgaggtccaggcccactctggcgccgtctggtcgctccaggtccggcccgacaaaaagggtctcgtcagcgggagcgccgacaaggacgtcaagttttgggactttgagatggttgagcaggaggatggggcgacgagccaagtcgaccggctcggcgtgacacgcgtcgtccgtccctgccccctcttgagtggttgccccttggtgcccgagctgacgttgtatcccccctttccctccctccctccctacctcccactgccgtcccgctctggcctgaccgacactcagtgactacctctaccgctgaccagggcttgtctctcctcgactcgtcctctctcgctttgtcctctctcgctccgtcttgctcttgggtctcgtgctctttcgctctgtcttctcttctggtctcgctcgctctgtctcgatggttcctttcctctgcatctcgcctgcctgctctctctgagcgccccgctcccttgcgccccgcctctcgaccgatgatgacggctgctccgcttgggatctcggaggcagacaagtgcctggggtcatgcgtacggtgttcgcccgcgtcgcgtctctcgcgccgacgcgccttgctctctgtctctcaaccgtcgacttggccgatggaccgtgccccaggcccctcctccttctcccgcaagacccttccgtctcgactcctgcctacgtccccgccaggctccaaccaacccaggataggcctcctgccatttcctcgccttcaaaggcgctcgacgactcggcccgacctcaaagacgcccgacgcccggacccgccacggcacgaccccgacctccgagctctccctctccttcctccctcctgtcctcgcgccgaacgcaccctcttcgcgctctgcctcgtccgctctccatcttgcaggcccgacccgcctcgcccgctccaaatctcgccgtcccagcccctcccgcacacgcaggtcgagagccgagctcgcaggcaggcagggcccgtaaacgaccctcccggggctcaaaagagacatcaccaccagtccaataccctctctcggcgcttttggcttcgcgtccctcttgtccaggaaggctattcccctttgtgggggccgaccaggcgtgcggggcgagaggctaaggcatgccagggaaggtgggctttacccctaaccctaaaagaacctcccctttcccctgctcaccccttgctttcgggaggcagtcagcaggaagccgttcggctctcgctttggcttgagggcctcagccgctcgctcctctggctcgccctcccctcctctctcccctctcgccaatccctccgaaggcagactccccccgcggacaccaaccctgcctaggtcggcctgcgcccctcacttccgcgtcgctgctcttcgcccgctcggccgtcccggcccgtctcaccccggtgatttccctcttgagggagttgctgcgtgtgtgactcgggtcagcgatggtcgtcggcgcaggaggcacgacgttcgaggcgccgcaaggttgcacctgaacctccccttgccccgtcctccgggatcgcgccggcacctaaagggaaggagaagtagagtccgtctctgagcctctgggtcgacctgtcctcgcccccagtctcttcttctctatctgctgtcgagaagggctgggcggcttggctagggggtcgaggcattgagggacggtgtccaccgcggtggtcttgggcggcgaggcggagcatccatcaacaagagggcgttcggcctcccctttcacacataccatcttccttcgagagctcggacggtccggcaacgcgggtccaaagttgggccgagagatcggcaacgcgggcgctaggcttggagggcgggcgagcacggtcgacccgggacggccggtcgatgcgtcctgtgctcgccgtccggtaggagggcttgccctgcaggggctcgcagacgcaggctcacagggagccgagggcggaaggcgacgggctacccttgggagggggcttcgcgaggcctacctccatggctgtcgactgacggccctcctgtcgcagacttcgtcccgacggtctttgcgcgtcgacgcttccgctgcttccccccctctctctctctggccggctcgtcggttcgcgaggaggaaggggccgaggagagtctcaagctcgagtcggggccctagcctgctcaatcaaaaggctcgtccttctgcaagggaaggcgaggacctgcgtcgctctcgcgagtaaccacaaccggaagacgtcggctcgctctcactctctctctctttggagaggagtagccgcgggccaatcgagcgctcgcgccgtcccccgcccactcgcgggtccctttgccctgctcgtcgacctcccctctggcccctgtacgtcccctcctcactggttccggcctcgcagtaatcccacgacccgcctcgccccttccttccttcggccgttctcacgcgcgatgacctcgcccaagggggccaaagaccgtccatctgctctcctcgctgctcgccccagcctcgcttccctcgctctcacgcgtcgggacgaccagacctccctctacagctcgaccagacccaccccgcgacgagcgcccgcgcgccagaggggccagacatgccagagcagcctacccctcgcggtcgggtcgctagagcgacagctcgcatactgagtgtctggtccttcgcagcgcggctgtgccagaggtgtgtggattggtcgaagagggcgggacgacgtcgagaggccggggttctgccagagcgcgagtcggggagcgggggcgcgagggccctttggcgcagggctttgcgacgcgggcggtcgtcgaggggagatcggggatccgcgcgttcgcgcgaggtcaagggtctggaggagcgaggcccacccgccgaggacggaggatggaccagcgctcggccggcccgtgcggttgacttcttttgcagcgggcaaggggcgggggcgctcaacttgacgctctctccttcccctcgcgggaatctccgtcgacgctccttcgagcaggcaccggcgccctgccgagcgcacgagctctcgctacttctcgccctccgggagagcaacgttgcgtcggcctttgcgcaaggcgcggacgaacgagaatggagggcccagccggagggggatgctcttgagttccctctttttgctcgaggcgaggcttgctgccgaagaccctcactcttttttcaccccttctggtcggacccggtcgctcgttgagcgggcgagatcggcaggtggggaggaacagctcgatcggtcgtcgtcgtcgtcgttcaacgcaggaaggggcgtgcgagaagactcatcggacgagggtcaggaaagtggggcgctaagctacaaggtgggtaaagcaccggccccgaaagggggggtcgagcgagtctagagtgcgggagaagagggcgagccggttgagcagcggccgagcgtgtgcggcaaggtcggcgggttgaaagcgtcgaattgccggcccgcctcattgggccgacggaggatgaggacggaggggcagaggggcggagggggcatgggcggaaagagagccgagccgacggaactagatgatacagtgtgtgttgtgttttgaggagggcggccggggtacgaagcgagagtctgggcgccagcgggtattgtatccgatgttggcctccgtgagtgctgcctttgaaggcggacgagacagacgcgggagagaggggttgcggagaggtggcgcagaaatggaagacgacgatggcgagagcgcgtagaggcgagaaaaagaggaaaaagggggaagccggaagtagaggggggtatcactgctggtgctgctggccgggcgactggccgtcgtgctgaccgtacgagtggtgctcgtgctactggtcgccgccgtcggctggcgatggctcggtctcgttctcgcccatgttgtgctgcatagaaccaagaagagggggccgtcaggttgtcgagatcgcgaagggggggggggaagagaaggacgcacgaaatcgagaatctccgagtacatcatgaccttccacgtctcgaccggctgaggcgatcaaaaagggttggagtcagccctcgtcctcaggggtcgtatcgaaacgacgccgccgcgagactgaccaggtcggcatcgttgaagctccagtcaaagagctttgccgcactcggctcgtcctccgggtcatggtacgggctcaggtactcgtgctcaagcgcccggcaagcgtcgatccgcgtcgccgggtcaaagacgagcatctgctcgagcaggtcgatcgcgagcgggtccttgcctggatgcttctcagtcagcggcgtccgggagcgcttggggagtgagttgacgaagcggagcgtctgcgagcgtgcgaacaaggggaaagggggggtgagtggtcgcctcaggcagaggttataagaaagacgggcgtacgttttcgctgccgatcgtcttcatgacgtcgggcgggggcgtgccgagcagctcggtgatgagcgagaactggtggacgtctgcgaggtgtgggcgatcgagtcggcgttagctcagagatccacctgcgccggcaggaagaggaggagctggagacgtacggtccttgcccgggaagaggggcttgccctcgagcatctcgctcaggatgcagccgaccgaccttgaggtcgcgacaaagtcgaaggaggccgtcagtcttcccgtagcgccccgcagcgcgacgcccaggccaaacgcaccacatgtcgaccgcctggtcatacttctgccacgtcagcataatctccggcgcccggtagtacctcgtcgagacgtagcccgtcatctgcgaatcctggagccgggcaagtccgaagtcgcagagcttgaggtcgcagttttcgttgacgaggatgtttgagggcttaaggtcgcggtggatgacgccggccgaatggacgtatttgagcccgcggagcatctggtagaggaagtactgagggggtcgcgatggatagaggggagagcgcagagtcagcgagaggcgtagcgagaagggagaaaggcgccctcgcgaacctggatgaactggttctcaagcttgcgcgagctcagcagccggtgcaggtcggtcccgagcagctcggtgacgaagtagctagaaggtacgtggggtcgcgccagggcaacagtcagagacgggtcgacgagggcggccagggcgacgaggcgaggaagggcagagcgcccctcgcccgctcgactgatgaacgcacaggtcttcaaggggcgagatgaagatgtcgctgagcatgatgacctgccgagaaaaaagaaaaaggcgtcgaaagggggtcggtcagtcactcgcccgccaaggggtgctgcgctcagccctcccctcctccctccaaccgattgcgagcaggatacgcacgttttcatgccggatgtgcttgagcagcttgagctcgcgatacgtccgcttgcagaggacgccggttgagaagggcttgagcacctggagaatgtaatgcgggcgagcgggcgggcgagcgggcgggcgagcgggcggtagggacggagggaagcggcatgtatgtcagtgctcaggactccagaagaaaaagcgtgacaagggcgaggcaagagcgtgacgaaagcgcacctttttgatcgcgacgggcgccgtcgtcagctggtcggtcgccgagctgcaagatcggccggggcaggagcaagcgaagcgcgatcgattgaggtgtgggtggggccctcgaccgacctcacccactggcgcctgcgcgtctcgcatggctcgcacggccgccacgagtgggtgtacctctctacggaggaggagagggaggcgtggccgatgagtttggaggatcgatattggattgggttggagacggtgcgttctttccccctcccccccttccccttctgttacgtagcgcagcgcagcaactgactccttctcccccttcctcttggccgcacaggatgcccccaatcttccgcgcgcaaagacgccaaaggaagcggcccggaacgcctttacgttctacaagacgttgcaagcggccgacgggcactgggcgggcgagtatggcgggccgatgtttctcatacccggtccgtcccttccctttccccttcgctcgtcctttctgctcgctagctcctcctcctcctccttctcgctcgccctcggcgtgagactgctcgggctgacgagcagcggccccgctccgtccggcaggcctcgtcatcagcatgtatgtgacgggaatgaagccgctcgacgagccgaaacggctcgagatgatccgctacctgtgcaaccgggcagacccggacgtcggcggctggggcatgtacgtctgctcacccttggcgcgccctcccttctcgccccttcgccacctaacgaggcaggtcgcgcgctgctcctttttctgaccccctccgttgcgcccgcggaatagccacacgtccgccaagcctgacgtcttcggcacaaccctcaattacgtctcgctccggctcctcggcctccccgcctcgcaccccgtctgcgccaaagcccgcgcgaggctgcacgcgatgggcggggccgagggcgtgccgtcctgggggaaggcgtggctcgcgatcctgaattgctacaagtgggaggggctcagtccgatctgtcccgagatcatgtcagtccctactcgcttctcttgcgtcgcttctatatggctggagctgaaacgccgctctccctcctccagtctcctgccaaagtggctgccgatccacccctggcgctggtggatccacgtccgcaacgtctgtcagttcgactcgcgctcccccttctcaaccgcctccgctcctgctgactgccttctgcctcggcccgcgacagacttcccgatgtgctacctctacggccatcgcttccagtgcccggtcgacccgctgatcgaggagctccggagcgtgagtcccttcccttcgacctgcccccctcttttgtctgacgccggccccctctcgcccgtcaggaactcttcacacaaccgtacgatctcgtgccgttccacacgctctcaaaccacatctcgccgatcgacctctactaccctcactcgcggctcttcacgctcctcacctacccgctcgccttcttcgagtgggccatcccgcgcttcgtcccagccgtgagggcgctcgcgctcaagaggctgtacaggatggtcgtgatggaggacgagaatacggcgtttcagacggtcgggccggtcagcaaggcgttccatatcgttgctcgctacgtcggcgatggaccaacgtccgtcccgcttcagcccgcatactctggcgccgatgaaagctgacatttccttctgctgccaccccagttcggaggccttcctcaagcatcgcgagacggtcgacgatttcctctggatgggccgcgagggcctgatgatgaccggcaccaagtcggtctcctttttccttctcaacctttcagcgcgcttcggctgatatcccggttgcctctgtctttgtagcggaagccaggcctgggtgcgtcagccggccctcctcgacttctgcaaagcccgccagttcgctgacgctcgcccttgcctcgcataggacatcgcgttcatcatgcaggcgctcgccgagacggagctgattgacgagcccgagaaccgcgagtcggtcctcaaggcactcgactggctcgacaaggcccagatccgcgagaaccgtgcgtcccccctctcctcccacttttggcactgccgtcctggcgcagcttgaggctgatccgtctgcccctttctccttgcgcttgatagcccggcattacgccgaggccttccggcacgcgagcaagggcgcttggccgttttcgacgcctgaccaaagctacaccgtcagcgacacgacgtccgaggcgatgaaggccgtcatgggcatccaggacctcgcgtctgtccccggccccgctgggcttacaagggcgattaagggctgacctcttgtctctctctccctccgcctggcgacgcagatgggttccgcagacaatcgtgccacgccggctgatggattcggtcgacacgctgctgacgatgcagaaccccggcggaggttttgcgagctacgagcggatccgcggcccggcctggctcgagctcttcaaccatgcagaggtctttggttcgtccgcgcgtcctctctccgaggtgcggcagcccagagagacgctaatgcccttcgcttttcccttgcgcccggccggcaggcaacatcatgaccgagtacgactatccagagtgcacgacctcggtcctctcggccctcgctatgttcacaaaacgctaccctgcctaccgggccgacgagatccggtgcgtgccccggctgggccgtctgctttctgatggtgctgggctgacgttggagtggggggcttccaatgctagccggacgatcgagggcgccatcaagtacatccacagctcgcagcgcgccgacggaagctggtatggctcgtggggaatcagctttacctgtcggtccctcttctctttccctgcgctcagctcgtccgctttagtcactctagccactccactgacccccccccctttgccctcgcgcagacgccacgaactttgcgctcgagtcgctcgcttacgccggcgagacgcacgccaattcggacgcggtccgccgggcgtgcgccttcctgctcgagaagcagatggccgacggcggctggggcgagacgtacatggtgccgtccccctcaccttcctccttttgactctcgtagcgcgcgatgttgacgacttctcggtcccacgcccgccagtcgtgcgtcctcggcgtctactgccagcactcgcaagcgcaggtcgtccagaccgcctgggcgatcctctcgctcgtctcggcccgctacccacacaaggcgccgatcgagcgggccgttaagctcctgatggaccggcagctcgacgtacgttggcccctgtgcctgatgacgctttcgaggctgactctgcgctggcttgcctccccgcgtgtcttctgcaggacggcagcttcgcgcaagaggacatcgagggcatcttcaacaagaactgcgccatcgtctacccgaacgtacggcctcctctcccgcctctcaccccgccaggcttgtctcggctgactctcctctccctcgcgccttcgttgaacgtagttcaaattctcgtttacgatctgggcacgtgcgtcggcccgtctctcctggtaaggagctcgcacaggggggcttgcttgctgacgttggactcgtgccttttctcgcagtgggcaaggccgacatctacctccgcgagcttgcaaagggcgagtagcgagcgggacagaccagggcaaggggaacggttcgatgccaatgcagatgcgattcgtgagagaagtcgagcgagcaagcatgggctgacggaggaaaggaaggaaggaaggaaaggaggggaagggagagggatcccgttgcgagagagggcagggcgaaaggggagggggagaccgagctagaggttgcgcgccgtctgggacaggccgccggtggaccgcttgccctcctgctgccgtgcgggtttcctcggacttccggacggcgggcgccggtggtggtgctgggagtatccggcggcggcgaacgggcgcttgttgccctcgtcgttcttggcgctggggagggcggtgtgcgacgggcggggaatgggaagagaagagagcgagaaggccgaggctgagggctggtgggttgatctttgaagaggcggacgcgacggcggcgtcgggagtggtagcgggggataagcgaacgcggtggtcgagggcgacaaccgatgctgctgctgctgctgctgccggccgagtcgaggtcgaatagattcctccatcggtagcggtggcagagggggagggaacgtcggcaccggaccgagtggcggaagccccccgcctccctgcgccgacgacgccgaccacgaagacgcgacggcatgcgacgacgccgaacgatgcgagcgcaacggcctggtctgctcgcgctcgggcgaaggcgtcgtgtacgtccttgcgaaactgagcgcgtacggcccatggatggggaggagcgggagcggcctgagggaggtggtgccgtcgagggtcgagcgggagcggcctcgtgggaggcgaggggtggctttgcgggagggagaagaggaggagagggccgcacaggagctgctggcggccgtctgtctctggccggggcacgaaaccgtggatggaggcgccgcccagtggggatgagcggtcggcgtgcggtcctcgactgtgcttggcgacgacgacctggaaagctgagcgtcagacgacatgaggtatccccactgatggagcaggccgtcgtactcgggcttcagcacggaccgctcttgtcagctcgtttgcgcgggcgggtagaaagaagtaaagaagggacgaacggcagcccaccatccgctcggaccagagtcgaacgacgagccctccgagagtgtcggtgaggcagaccggacctgaagcgagccgacaaaaaggaggcgaaaagagggtcagacgagggtgcatgcgcagcgcagggagggaggagagggagacggaccttcttccacatgttcccggcggaggaccatgcgctctcgctccccgtcgtcggcgtcggagtgggtagcggaataggagccgccatcggcgcaggcgaggtctcgccgtcgtagaggacgatgtggtgcccgtccggccgcggtcggtgcttgactgaggcgaaggggtcgccgccgctgccgccgctgccgccgctgctgaggggggtcagggtgccatcggcggaagaaggagcggcggtaccggctgcgcccggggtcgaggaggaggaggtagcggagaggacgaagcccctgcccttctcaagccagcccttgaggagctcgccaccagccgacgagctccaccctgctcctcctcccgctgccgccgccgccgtacccgcgctggagcccggtgcggcggcggcggtcgagtgtgcgggccgatgtttctgagtgggcggacgaggcgggcgggatgactttgagcgaggcaggagaaggggcaaggccggcaccggcggcggcggcgggggtgagccattaccgacggcggcggcgggaaattggaaggccggccgagggggcgttggcggcgctcggctggttggctggagggcgtgtgtacgggccgacttaagcgtctttgagcggtgggggccggcgaaggacctccctcccctctccctctctcccatccctacgcatctcgcccacccacctcgccctcaacgccctcctcgccttcgccctcaacgccttctcgctcgcgctcatgcgccgcgtcggctcgctgtcgatggctctcggcggaaccgcaaaggacctgtgcctgatcgtcgcgagcgtcgggctctttggggggcacgtgtcgggcgtccaggtcggagggtatgggctgtcggtcgtcggacttggcctctatcggtacgcgacgtgagaagggcgcgccaactcgcccccgcctctagacttagatgcgccctcgttcctcaccaaaaacgcgcgctctggcaactctcagatggccgttaacattggacagagacgaaagaaggtgcgtatggccggagcgagggtcggggaggcttcgctctcaaaagactcagcgctgagtggctcgcctgcccgtcgccgaaactccccacaggcgaggccggcgacgcacagcctggcggccgaacagacctccttcagcatcacggctcatcgaaatccagcctcaaactaagagaaatgccatttagtcgaagtaaagagaaacgccatgatagaagaacttcagtagacttcgaggacgtagcgctccttttccttgagctcctccatgtgagcctcggcctcgggccggccgagccccttgttctcggtgagcgagccgacgagcgcctcgtagacgtccggcaccggccaggtcgggccgcagaggtagaagtagcccttgtcggcctccttgtccgacgtgaggacgtccgagaggagccggccgtcctcgagcatcttgtgctggatgtagaccttggccttggtgtctcgcgagaacgcaagaccggcgtgcgtgatgagcccgccggcgaggtaggcctcgatctcctcgccatagaggtactcctgcgacgagtagcgggcaccaaagtagtagattagtggcccgacggtgatgccctggctcttctgccaggcccggtgctggatgaacgcccggaagggggcggcacccgtgccgaggccggccatgatgacgggctgggtgtcgagcggcggcagcttcatgacggacggcttgatcgagaccgtcacctgctggccgagcttaaggttggcgaggtagcgcgtgcactggccgaaacgcggcttgccggtcgacgcgttccactcaaccgtgacgacgagaaggtggacgctgtcgccgacaaacttctgggccgacgagatcgagtagtggcgcgggtggatctggaaaaaggcaaggcggcgtcggacagcggtcagcgaaggggaaggcggccctgcggaaaggcagtcagacgggacgcacctcgccaacgaggtggacgagctcctcgatcgcaatgttcttcttgaggccagggaagcgcttgaggacgtcgacaaaggtgacagtctcgttctcggaccacttcttgaacatgctcgagccctcctggctcgagatgaagcggagcgtgcgcgcctcttcgcggtcgtccgtctttgcgacgagcgcggcgtagaaacccttgggcggccgaccaaagatgtcgacctgctgctggaacatctggagcgcagtccgcgtctcaaccttgccgttgacggggactgagaggatagcgtccggcgcgacgccgtaccactcgaggaattcgcggacctcgtcctcgtcgttccagccgtggacgccgagcgcctcgccaacctcatacgtcaggccggtcccggccgtcgagagctcgaggtggaagacgttgcgatcgtaggccgtcggcgtcagccgccgattctcggtcacagtcgcgaggtacgtcttgtccgggagcgagggcgcgagggccgtgaccgacggcgtcgtctcggcgtcggccggcgcgaccgcaaaggcctccttgaaaagcaggtggagtgcagggacgtgccagctcgcggtgagcgggccacgggcgacggccgaggccggtccgacagccgggaaggagctgaggccgtcaaaggcgagcgcagagcgcttctcgtcctcctggtcctcctcggcgtcggcaaagccggcggtcgagacctccttaagcgcctgctcgccgacggcgatgagctcgctcaggtcggggccgagcgccgcctcaaggacggagcggaggccggcgggaagcttcgcgccctcgccgacgacgccagcaaagaggaggaagaagccgacgaggccgagcgcggtcgcctcggcctcagcctcctcggcagtcggcttggccgcaccgggcttggcgacgggcgggggaaggacaaggacgcgggcgttcttggccgcgagaagctgccggtcctggacggcgaggctgtcggcaaccgaggcggcgtcccagttggcgaccgagataaggacagttccgccctgcttgaggctcgcaaacgcgccggtggcctggagggctccggcggtcgcgacaaagacgagctcggacgactcgacccggggcgccgaggtgaagggcttccgggcaagaccggcctgagcgggcgcgatgacgacggtcgactgggcgacggccgggacgagcgacgacagggtcgagacgcgggtcgagagcgacggcgacgagaggaacgtcttggtcaggaccgaggggaggagcgagtcgggcgccgtgtagaagaccgtctgcttgacggcagcggcgacggcagacttgcaaacggcagtgatgccgatcgagtagaggaggttatcggccgaagtctcgccgccgctaatcgaggcgccggtaatcttaggcagcttgccagacgaggtgccggcccggccaaagacgttggcaacgacaaagtccttgaggtagccgacggccacaagctcctcatcgacgacaactagctcggtgacggccttgccgccgtgcgggagggcggcgaggagcgaggccgcgccgaccgcaggcgagaggacgttgaccgtcaggacaccgaacgagggcgcgagcgtcgcggactggaggacggcggccgagtagccaccggcgaggacgatgatcttggtcgcggcctcgtcgccctcgaacgagaaggcctcgacctcggccgccttcgatccggcagggagggcgcggacgacctcgcggccggcaaagacgccgtcaaagacgtggaggacgttgacgtcggcgaggccggccgagtagatggcgcgcgtgttagcgacgatgtcgtcggccgaggccgagaagatgacggtgaacccctcggggaggaccgggaggagagcgttgaccgaggcgagcgagggcgagacgccggcgaggggcgtctcggccgccgggagggcgaccgagagctgaacgacgagccggttggccatcgtcgtctcggccggcaggttggcgagcgccggcaggaggagcggcagcgtcgggcccgaggcgaggatcgtcgcaccctggctggcggcgccgtccgctttgaggtaggcaacgacggacgcgccggcgccggcgcgcgactggaggtcccaaatctgggcgggctgcttcgagcggtggagcgcggcagggagcgggaagccagcgagcttggccgagtcaaagacggcgaggagcgacgagtgctccgaagccaggtggctgacggccgcgagtggggtcgtcgcggcggcggcggcagcgggctggccggccgacttggcgcccgagacggggctcgaaggcagcgtcggcgtcggcgaagggattgtagaggccatggtggacattctgtctcgttcgagtaggaggcaaagggacgggaaggcggttccgtcgaggctgcgagggtggaggatcggagggaagaggtcagcctcccgtcggatcgaggcagaatttggagtcgcgacgcactcgaaagagagtccggtttaatgcaaaaggagcgggagtatgcgctactctgataggaacgagaaagggtcggccaggcgagaagagagaagggggagaggtcgctggtggagaggaggggaggagcgaagagtgcggccggcgagcacggcatttcgggctgagtagtcggcggagaccccgcaaacgaggtagcacgccagctcgacttgcagccgcagatccaaagtgccgggcccggggaggacgggtcgacggctaaatggtcgaagacagtccctgcccatgctcagctggtgaactccgagaaatcgtgcgaggagcaggcaaacctacggccgtcgttcagcgagagtcggaaaggagggaggctgctatcggctgtcgggcaggcgggcgcgcagcggcgagcaccccgctcgccctgatcctcgttcctccttgccctaacgacgagcgagcgcagacggtcgcactcgttgacaaagagagagatgagctccttgggagagaaaggcttgcgaagagctagaggcggatctcttgccgtgcctacgtcgcccgctcgctcggctcgactgcgccttctcgcccgaccacgacccctcggcctgccctcgcacaccgcctcttccccttgtacacccatttcccgtgccccccctgaagctcaactatggcgcgcaccaagcaaacggcccgcaagtcgaccggcggcaaaggtttgtccctcacccttccaaccaggcctcctcaccgccccttaccgcgcgcagccggtcactgaccgacctgaccgccaccgaccgactcctgcccccctcggaccagcccctcgcaagcagctcgccaccaaggccgcgcgcaagacggctcccccaaccggcggcgtcaagaagccccaccgctaccgcccagggacggtcgccctgcgcgagatccggcgctaccagaagtcaaccgagctcctcatccgcaagctcccgttccagcggctcgtccgtgagatcgcgcaggacttcaagacggaccttcgctttcagtcgtcgtgcgtccttgcttctccgacctgcgtccttgccctgactgctctcatcctccgctaacacgctctgcttcgtgcctcggccgaccgccgccgccgccgccgccgccgtcgtccgcagcgcgatcctcgcccttcaagaggcgtccgaggcctacctcgtctcacttttcgaggacactaacctcgccgcgatccatgcgaagcgagtgacaatccagcccaaggaccttcagctcgcccggcggctccggggcgagcgctgaggccgtcaccgcccgggcttgcgtcgcgtcgctgtagtctcgactggccgagcgccctcctcggccacctgccatgcctacccttttccttgcttgtatctttgtctcctcccttttgaacttctgttgttgcccatgctcccttcttgtccttctcgatgagattcccgttggccggcgcgcatacaggcgacgcacgacgcgcacggtcgacacaaggaagaggacgaccactccaccgtgaacctctagcgggaactgaactgggacgtctcctcgagcaggaaatgggttgtcaactagcgagcgcgtccgaacttcgacctggctggcccgcttgcgtccttggcctgagaccaccacgccgcgctttactcgatcgggaccagctgatcgtccgggacggccgccgccttcgggtaggtgatcgtcaggacgccgtcggccatcgacgctttgatctcggagggctatcagagagaggagagagcaacgtcaggtcgctggtcgactgcaagcgtggcgaggcaaagaggagggacgcaccttgatgcctgtggcaagaggcagctcgcgctcccacttgacgccatcggcgagccgctcgcggacctgccactcgacagtctcgccggcatcgctctcacggctcttgcccttggcggtcgaccgtcgttgagccgagacgacaagcttgcccggccggagggcgatcgagacgtccgacttggcgaggccgggcaggtcgagcacggccgtcattgtcggcgatgtcgtggtcgtcgagagatccaggctggaggcgggcaggggaaagggtgtcagtgacggaacctcaggtggagagatggagagatgctgatttagaagcgacgcacctcggtcgtcggggagacgaagagctggaggcctcggtcgacacgtctggcgcagccttgctggcggcagctgacgacgacgacgacgacgagggtccggccggagatattaccgtgttactttgagcagccgcctgcgacgaggcggatgaggcggcagcggcgaggttggcgaggacgtcgtggatgaacgaaggcaggtccgactgagcgaggcccgaaaggagcgaggccgggtcgaagcccggaggaggggcagtgccgaagaacgaggacgaggccgggcacgagtgggcagacatggcgaggctgtttgggtgatgagaggcggctgaggcgagggcggtgaggtaggtgatgaggctgctggtcaagacctgcgcccgcccagtcttaagacctgcaccggccttctcgctcgaccgaccgagggagatcgtgctggaagctgccagcagggcagccgccgcctgtcgacgtggccggtggcgtcgtcggcttagccaggagtacgcacacacgcgtcctcgacggccctcgctcttgccaggcgcttctaccgccgcggggcgaccgggcctgacctgatcctctctcacggccctgcgaccggaggaccaagcacgggcagctcgtcagtgtcagctgagcatggcagtgcagattagtgtccgacagcgggagcagcagcagcagaggaggaagagcgagggtcacccttgcttcatcgacgtcggagggtcggctcgacgcgtcccctcgtctcgtctcgtctcgtcgccgccgacgttcaccctgttcgacgacacacaaggatggcctcgacatcgacctcgctccttgcgagcctgacgaccgagcagcagcaggcgctctacgatcagggtgcgtcgacgctgagagagtcgctctgtggctcgcgatggctgatcccttgccgcttgccctcgctcgccctctcgcccgtcagccggcttcctcctcgtcaaggacttgcctcagggctcgctcgcaggcatcgacggcaggtaggtcagttgcattgcaggacgagagacagcgtcgcaaatcaacgtcaggctgaccctcgacggcgccctgccctgcgaccttcgcagctgccaccagacgctcgccttctcgggcttcaagctcctgccgccgtcgctccatctcgccatctttgcgccgccgcccggtcgttccgagagtcctgtccctgctccacggacaggcacgctcttcttctcgacttcgcggcaggtgatcgcccggacgtggtcgcgcgcggtcgactcgctggctgcacaacccgccgaggaggagccggtcgtctcgcgcgaggtcctgcagacgctcgacaaggagctcgcgccctacccgtatgacctctggccggcatggaagccgttgcttgacggtctgacgaaggcatcgatcgagcgagtcctcggtcctggcggcgacggcccgggcagctgggacctcgacggtttcgagattggcgaggaggaggagctcgcgagcagtagcgacggcagttatgcatcgctcgcggctgcgcgggtcctccggcatcgagccgagcgcgagggcaagccgttcgatgggctcactgctaggcggcctgtagtggcgtcgacgacgacagagagcgaccagcgccggcatcgctgggcgcagttcgacatccgccgcagctggcgggctggcgccctcggcgaggaggtcagcctgtttgcacgcgacaagagctggctgtttgctgatgtcgtcgagcggcagtgcacgggaggtgcgtctttggccggagccacgttgggtcatgtcattgcttcgagttactgacctgctcttgcccttctcgacagacccgcatcggttgctcgaccagcttgccctcctccttccgctcgggcttgagcttcaggcgccggcgctcctcctcaacacgtaccgccggctgctggcgctcgtcacccaagctaggctccacctcgacccgctcgcgggcggccagtacctctcgccaccatcgcccgagcggacgctcgcactcgcccgcttctacctcggcctcgtccggctcgtccattctcaggcggtctggctcgcgcccgacttcttcgcgaccgagttgcctgaggccgagggctggtggcagacggcgctcatcgacgacctgctcgacggcatcgtcggcgcgtccgagacctacgccggccacctcgacgagccgacgaacgccgtttgggcagatacacgcgcacggggcgatgccttgaggcagctgctcgctgaccgcttcggctgggctcggcaggtgcgggggtcagcacacggggaggccgatggccaggacgacagcgaggaagaggacgaggaggaccggcctgtgctcgtcgacaacccggaccactacacgctcgagctgtgagcggagtggctgattcgatggcttccgctgctcacgagactgcgtcggagaaagttgctgtctcagagacatgatcatcgcgcgtggccgaccgcttccagcaagtcggcaggctgaggaggagcctcgagcggcacgccacagtcgcggccctccttccgtagatccagcacgcggaagaagccgcagccctcgcgtttgacgctgccgtcgccaggcttcttggcgccctctgcatcggcgtcgagaccggcccagcccgctcgcttggtgcacgtccagtaaaagacaaacgactccggcgatggacccgagccgacgccttttgcgggtgagccgggcgcggacagtccagagcggagagagagcgagacagtgctgcgctggtcggccttcagcatactatggagtgtcggcagcaagaagggatcagccgcggtgaggagcaggggaaggcgaagggagcgacccgactcaccagggcagcttgcacgagcaccgaggcgtcccttcgcgtcgtgcctccttcgagccgcccggagcaaagtcgggcctgtagaagcggaacgtgatggcgatccgcgacgtgtagctcttgcgcctttcgggcgggacgaacgtctggctcgcatcgtacgtcggccggaagacgtcgaccgacttttgcgtcgggatcgagtgctggaaccgttcctgacaaggcgggatcatgcagagcagcgtgttgtggacgagcgggacatcgaacgtcctcggctcgccctcaagcaggcgcaccgcagggtccttgctccgaacctgccggagccgaaatttgcgcgaggtgccgagcgagagcgagacgatcgtgcagtagggtccgaggtctggaggagcggcagatgggtcagcactctgcgagcttggtccattggacaggatgacggacaggtgagctgatcggcgtgcaggccgacgctgagtgaaggagcgccgcgcactgtcagcgcacgacacactcgccgagcagtcagacgcatgaatcacccggaggcagcgccgtcgtaccggttgatgcccgcgacgccagccctccatctgccctggtactcgccggcaaacttgcgcgcatcaggccgagccgccagcgtgtcgttgacggcgtcctcgacgagcagagcggcctcctgaagtagcggcgagtagagcggcggtgtcgggcattcgacattgttgttccctgcgaccagctttgagtcagtctctgggtcgctatgggcgaggcaaggagaagacgaacagaaccgggccgactcgtcgagttcgcccggagggtaaggcgggtcgactgcgctctggtacattaccgtctgcggaagcgggccacgagcgggtgggtcagcaacggcgctgcttgacatggaaaagcatcgctactgaccgtatgagccgactcgaccgtcctcccgccaatcacgtactggttgaaggtccagcctttcgagtcctccatcagctcggagaagagggcagaggccagcctcggcggcagcggcgacggagggaccgccacgcagggtagatattgggcgagcaggctcggcgtcgccagcaggagcggcggcagcgacgataccggcttgactggagccgatggcagaggggcggcggccatcagccggtcgagggctgaaggagcggtcgtgaggaatgccgtcggtggtcgagatggcctgccgaccttggccggcggtgactcgacctcgagccagccggcgaccgtcatcgagcctctgaccctcttgcgtgccagagtgccgcctgccggtcgtgctgttgctgctatcgcttgaggcatgcggctgccctggccgctaccacctcgtcggagggcctccgcagcgcgctcgaccgagccgtcggcgtcggcgagggcgttgaggatcgccgcctctgatagcgaggccgagagcggaccgtcgaggagcgaccggacgaggacgagcaggagatcattgtcggccgggccgtccatctagagaaaggtcgaagtagggtggcaaggacgagaggaggagcatgcgcagttgaccctcgaccacgtcctcctcttcgacctgctcgcttctgcccgcccattagctgccaccctcatcgactgccacgcctaacagaccggcagagacccaaacgcaatcatccctatttgctgccaatgtcgctcaactgggcccaggtgacggccaagccgttcgcaccggtcccgctgccaggtgcgtgctgcgtcggttgcgctgttgctgccttgccagggaggctgacacgaccgcctgcccgtcctatttcacaccttaccgagtgcaggcgagcgtctcgtctaccagctcgactcggccgaggtcgtcctcgaggtcccaccgacgctcgagggtccgaaggtgggttgaccacgagagttgcgagcagcctgccttggcgtcatcgacctgacaacctctcgctgccgcctatctttccctttctccctgactcgccgctcgctggcctgtcggttgccactggcagtggtccaccaggtccaccggcaccgtctggatcaccaatcagcggctggtcttcgctgcaccgacggcgctgtcggccgctgcaagggtataggtcgtcgttgagcctttaggcgtcggtcgtcgactaagggggagctgatagagaggcggaggactcggaggccatctcgcccgcgccggcgtgctgcgggccaggcacgtgggaacctcataaggcagctcgccccgatacgcaccccgcactgaatcgacagcctctgtctgctcgcgtcacttgtaatccctcccgcttgaccccgcacgagctggaccgcctagcgcgtcgaccctagatcagaaagcgaggaaccatgagagaacgaggtgcaggaaggcgtaaaaggcaagaaagggaccggagacgtgaaggaagagaagcagcgctataaaggacgacgacccttagtcgctctcgctggagctggccgatccctcgtcatcgtcgtcatcctcgtcgtcgtcttcggacggcgcggccgcctgctggactggcggggcgacccgcttgccgccgagcttgagcgtgatcttcttgccgccgcttgccgacggcccgccgacgtcggtcgaggcgtcggtcaccggcgtcgagacgccagcggtcgagttgggcgccggcggggcgccagggaggcccgagccggcgacgaggttggcccagagctcctcgagctcgcgctcgagtgcgagcgcgtcgttccagacccacgagccctcctcattgaaggcccgggcgttttcaaacatctgccggaagtcgtcggcgaagcggccgacgtccttgtacgtgccgttctggacgcgccgcttgatctgcgacatgaagacgggcttcgggatgaggacgtagtactgcggatagagctaagaagacggcgagcagaggcgtcaggaaaaagcggcagcggaagaagagccagctgcggaaggcgtaccttcttgtcgacggccgtcaggaaggccgcgcttcggaggccgcccgtctcagatccgggcaggttagccagggccgtatagatgttcatgagcgtctccttcatctcgcccgcacgcgcgccggggccgcccatcttgcgccgtttctggtgaaggcatcgcgagagtcagtgatcgaagggtatcgggacaaaggcgaggagggaacgcaccgaagacggcatgctgtcgtcgtcgtcgtcgtcaaaagtcgtcgcgcgcgactgacgcgggcgcttgcgccggtcggccgtcgccgaagacgcctcgtcgtcgtcgtcgtcgtcgtcaaggatccgctgcttgttcttggctggccggccgcggccgcgcttcggcttttcaaacgcgctcgagaccgaaccctcgtcgtcgtcgtcgtcgtctgtcgcaaaggcggcctgcgtccggcggccggcgcctcgccgcgcagcgcgctccatcgccgcttcgagtccgccctcgtcgtcctcgacggcgttgaggaactgttcctcggtcaggccgtcgtcgtagcggacgtcggcccgagcgcgatgaccgcgaccctcctcgggcaggagcgactcgtcctgcttgggctggaactccttcttgtagaactctgggacctcctcgtcggtaaagagccggtctcggaccggtccgacgccgccagaggccgtccagcgccggagggcctcgtcgtcgcgctgctcgtcgagctgcttgaagatcggaatctcgtgatcgcccctggcgaggagttcgttgatctcctcgtcgcccatttcgccatcgtcctcctcgtcgccctcgtcattctcagcctcgaggagcgagcgctggtagagagcaagaggcgagcgagcgcagcgtcagtcaagagcagacaaggagacggagcgccaccacgcgcacgcaccaagagcgcctcctgctcggccgccgacgacttgttgtcaaactttccggcctggatgaccttgccgtcgattgcgagcttgccctgggcggcgctgtagatgtcttcctcgatcgacttgttggtgatcagccggaagatcttgacgaccttcttctggccgatccggtgcgcgcggtcctgcgcctgaaggtccgcgtgcgggttccagtccgagtcgaagctgaagggcgaaggaagggatcagcgttcggctgctgacctgacagagcgcgcacagcggcacgcacatgatgacggtatcggccgtctggaggttgaggccgagtcctccggcgcgggtcgagaggatgaagagcttgtgcggtgactcagggtggttgaacctgggcgcaaggggggttagccgcaggaccgaagggccagcaagacagagcgacgcacttgacaatcatgtcggtccggtcctcggccttggttgagccgtcgaggtggaggaactggccgccccatcccttgtaggtgcagtagtcggcaaagatgtgcatgatctggaccatctggaagaagatgaggacctgcgaagagaggaggggatgggagtcagccacccagttctgaccgcgttacccgagcaagcgcaagacgggggggggcgcacccggtggccggtcgcaaacagtttcgggaggatccgatcaaggagctcaaacttgccgctcgtccgccagagcgagtcgtcgatgttgcgcgtcgggttgattgagtcctcaatgtcgccaatgacgaacgggtggttgcagatcttgcggagctgcatgagcgtgttgttgaggcccttgacgacgttcgacttgcccgtcttgtcgttgccttcggacgcgaggaagccgtgcttgcggtaggtcgtgtagacgcgctgctggagggccgacatgcggcacttgatgaccttttcgaccttgtccggcagctctgactcgacgtccttcttgagccgccgaaggaggaacggccggaggaccttgtgcaggcgccggatgatgagcagctgctcctcctcgttgatgtcaatcttgtcgctcgtgcccgtgttggcaaacggcgtgttgaaccactcgtcgaacgacttgaccgagttgaatactttgggtaggacaaagttgaggagcgcccagagctcgggcaggttgttctggcggcgggcgaggcacgggggagtcagccgcgagctaaggcaaccaacagggagcaaagaggcctcctcacctggagcggcgtgcccgtcaggatgagccggtagcgcgacgtgtagtgctgcgtcaaggtctgcgagagcttgctctgcgtattcttcatccggtgtccctcgtcgataatcatgtggacccacttgatcttgccgagcagtgccttttcgcggatgatatactcaaacgtcgtaatgacgacctggaagttgccgttcttgatcctggcggccgcatcgcgccgggcctgcggcgtgcctttgaagatgacggtcgagacggacggcgcccacttttcaaactcgagcgtccagttggtgatggtcgagagcgggacgatgacgaggaacggcccgcgctgctgcttcttctcgatcaggaacgtgatgagcgagagcgtctggatcgtctttccgaggccctggaaaaagcaagaggaaggggggtcagctcgagctcgactgagcggggaagggcaggggaggggacggaccatttcgtcggcgaggatgccgttgagccggttgttgtagagcgaaaccatccactggaggcccttgatctgatactctttgagcgtgccgccgacgaggatcgacggctgggccgaaatcttctccgagatgcggtgcgcgaccgcatagtagtcgactttgggcttgccggccgacgccgccgactcctcagctcctccctcgggcgcggccgctccggcgccgccgccctcctcgtcgccgacctcgtcgaccatgttgacggcgccgaacatggcctcgtcggccggcccatcctccgtctcgaacgcagcctcgtcggcaaggccgccgtgggcatggacgtcgtcgttctgctgagcgacgacggcctgggcgagcgagtcgaggaaggcgtcggtctggcggaggaggtgggtgatgcgcgtgtcctttgccgtgtcgagcaaggccatataggcctcttcatcgtcggccttaagcgctcggagccgctccttcgagatgcgctcgacccgcttctgctcctccttctcggtcgtgacgtggtacgagaggaccattcggccgagccgccggcccttgtcggccgcgacagccgacgcccggacgagctcccgtccgtggcggacaatctggtcgacataatcgttctgcttctgcttgaccttcttttcgcgctcggtccgctggcggcgctcaagctcctcggtccgtcgggcgtcgcgctgggcgaacttcttgaccttcttctggacggcccggtccgtcgtcaggacgccggcctcgtcgagcgagcgaagcgccgtctcgcgcagccgccgctgcttgtcgacgagctggagccccttgagctcaatcagcgcccggcgcttggccccctcggccggctccgccaacggcggcggcaggagcggcgcaccatcctcgccgtcaaacggcgcagggacgaggcccttgacctcaatcggcccggcccgctcgccgagcatcgccgagaggctctcgagctcagcgatccgccagtcgatccgcgtctggacggcccgctcgcgctcctcgagcaggacgtacgggtcgagtccaccgggtaggaccgatggcatcagcagccgctgctgcttggccgaggcgaaagccgacgtcggcgtgtgtttggcgaggaccgtcagagggtgggtgtaggccccaaaggcgacggccgacgacgacgacggcttgccagcgtcaagcgcttggtcgagctcggtcaggtcggcagagaactttggctgctgctgctgccggctctcggcctggtgcgcgacgtccgcgacgccctcgaccaccttacgcgtgagctcctccccaagccgctcgccaacaacccccgtctgctgctgctgctgctggccgccgccgccgccgggagcgttgccgaggatcgcagcttggagatgcgccgggattggaacatttttgccgagcagcttgtacgtgtgcatctgggcccggagcgttgcaatctgctcagccgtaaagttggccgtcgtcgtcggcccgatcggagggccgctggtagcgggggcggcgccggcgccggctggaggagcggatggaccgcccgggccggtggcgggagctggcatctgcggtccaccgggagcggcagcgtttggaccggcgtctgagtggagggggaaggaagtcagcgatgcgcctcgacggaatccaagaagcgatccgcccaggaaggaagactaactaggcccgccccccgcccccctctgctgctgctgctgctgcttctgcatctcgacctgctgcatctgcctctgcttcgcctgggcggcaatcttgttccagtccgagagcttctggaagagcttgatgacctggccgagctggccgagctcgggcgacgtctgctcggtcaggccttgggctttgagggcggccatacgctaacggacggggggggggggaagcggtccaagtacctcggtcgcaccgccacccctttcttccctctcgttctctctaccgccggcaccctctcccccgcctctgtccccctcttcgaccactggcgcgccctcatgccgtcgtacggtctcttctcccgcctcctctccctctcacttctccgggcgcgtgctcgctttttcgccttctaagttgcgctcccttcctctgcttccgtctcctcccctcgtctaactctcaaactcctcgcctcccgtccatagacccgcctttgtcattgcatgcccgttacaccctaaaagaacctaacccgtagttcaaaatgcctgcgtctcaatgtgggtcgaccaaggtcgaccaacgtggtaagagaaacatgatcttgccatgctgaaaaaaaccgacggaattgtaggttcgtgtgcaaacgatacaagcctttaggcaagcaaacggggtgccttcgaaactccacgaaatcatgttgattcgagaccgggcttaaacgccattttagatcgggtgggcctggtctgtaacgcaacagcagccttcagagcaccgtagtcactccaggctcatcagtagtcttcgcaagatcgtctgatagactctgtacgacccacttcgacggcttgcgccgtcaggtcggcggctatgtgcgtcagatcgagcgctggctgattgcttgttgaagatagagggtctcgctggctggtctgaagtgatgctgccattagtgatgctccctttggtaagggaagatcctcacggacgaagccgcgcgatgttagggcatgttggcaggcttagaggacaggtagcaatggcggtggcgttgaagtttgctctttttcactcttgacgagggccttcttataggtcatatgcatgctgtaccggcgcttctcatttcgtccaagaagaagagcgccaaacttacaatggaatcgttccttttatcccttcaatcgtcttgttcaaactctgccccctgaaaaactgctgaagggtgaccatcagggtagttccatcctcttcacatcacatctaagagacattgccgtgccgctaccgaggattcggggcctcgaggcgatagacagtctgtgtctcgttgaacattacagcggatgaaagactgggttgatgggggcgtgtcgacgtcgccatcttaccctgaaatgcacttttcacccggactgcgctctgaaggcgaaggagggccatccggcttaatagcgtcacaattctctcagcttggttagcgaagactaaccttaatcatcgacaaagacttggcgactaccgtccagcatcatcaaaggccttttttacctcgtctaagctgaccgttttggcttgcttgttcgcctagcagcgattcagacagcatcctttccagctgcttgtcccaaccaatcgctcgctctcgaagggcgttctcgtgcatgcgccacctctccagtctgctcgcggccagaatcaaggtgcgtgcaattgcccgttcgcgacctaagcttgacgctgactcgatcgccctccgcaactgctggcctcgatagcttctcctcgccgcaaactggaattggacagcacgccagcgatgaccttggcctacctgacgtcccgccgtcgcgcccctcgccagacgcgcctttggtcgttcaaggtcgttgcactcgcgctctgccctcagaacggccccagccaagaccaaggcctgccgctgccgctgcttgtcggcagcgtcggcctggagaatggcctcgcagattgttctcgccctgccctgtgcgcttcctttggcaccgcctcgaccaagcctggctcgccaatggcgcaccacctggtcgcatcaaccgcctctcaacaagcgtctcctttcctggtctttgctttttgcctaccggcatcccctgcctatcggctctcagcactggccttgctaacccgcctgcttacactttgagcgagggcgtgtgccccgctgtcgcgaaggatcgtcgagtggcagacacgaagccgcagggtagagcagacaaagagctcgagggcgatcaaaggagcctccctgttcaggaagtaacagcagcttgccggtcagttggctcggaacgcaatcatttgtacagcgcccctctttcgctcatcgctgcccgctcagcaatcctgccccttagtccgtgcgaaagccggcgaagatgaattggcatgactggactcgtcggcagacgttacaccgataaatacgatgcgctgcgcaaaagggacaagcattggttagacgacatgctcctcggccttcagcccgtcaacccggtccagcacggcctcgccgagcgccttctgcgtcgtcgaccaccaacggccaagctcgccctcatcctctccaagggtgcccatctcccatccaagagagaggccaagccggccggagaacgtgtagacaaaaaggagcgcggcaccggagcgctgacgcgagcccgttgtcaggcgttggagttgaacgaccgggtaggcctgtccgggacggtatatggcgtcgaggttaccaaggagcgacaggccgagaagggggacgttcttggttgaaggcttggccgatgcaggcccagcggcggtagcgaaggccggcgcggcaggggtcgtcggctcgctcagagggggtgagtaggcggcggcttcggcactggcgaccgacttagcgggctcctcaacctcgagggcaggcggccgctcgaccgagccctggaccatctctacgccaagaccgagaccgacgagactcgcattgccggtcttgaccgcagcagcagcagcctcggcctcgtcatccttgcgcgcccagtcgcgggcacgctcgccgcgcgactcgccctcggcccagacgcgtgcggccgtaggccagcccctggccgcgagacgcgctgtctgctgcttgacttgccgcgcgcggtgccagacggtggtgatgtcattggcggccggcgagacgaggaaagacggcagggagagcgtgtagtagccgagcgctaggtggacgaacgagctcggctctgcaggaatcttgagacttgaggaggattcgtccgcgaggtagggccggattgacatggcggagtagaagaggctgtcggaggagcgctgcatcagcaacgtcgtcctcggacaaaccggaaggaagcccacgcacctcggctcctccttcttgagcgcgccagcttggatggccgcccacgcagcattcagcgccccgacgactgcctggccgacgttgacgttttggcgcttgcaggctgcgagcgcagcgatcgtgtccgtcttgctcaggagcagagtcgagacgcgcgtgcggggagagtcgctggccagctcggaggatgagcgagcaagagcctggccaccctgtcaacgagcaatacagacgccaaagggccggtcagctgatgaggcagaagaaaaagcgagacaatgcacgcacgacaccccgctccatcgtgcgctggtacaggacacggccgacagcgcgtcgccacgcctggcgagggttgaacggtggcgaggagatgctcatccggtcgagagcggtatttgtcgctgataagggtccgacgttggtcgagccgtcgacggctgagtgtcgcggtgcgggagggcggctggacggtccgaggacgagcagttggagtcgttcgtcagccgatggcgggaagggtgtcgaccgggcctagcgccacgaaacaaggcaggccgagagaagcgtcagtgcctgagtcgcttaaagaacaagtcagaggcggtgcaccttgagccgagcgatcgtctcgcgttccagcagccgttcgagctgcccgactgagcggatcgccgagcggccctttccgccaccgttgtcgacctcgtgctcgccctcatcagcccccgctggcccgaacgctaatgtgaataaggcgtcagcgagggcgtggagcgccatgccgtccgccgcaaagtggcccacgaaaaggaggacgtcccaggcgtcggcctcggcctcggcctgggcattgactgccgccgaggacgaggtgtcgacgtcggcccggacggcgggttctccagcagagggcgtcgagggcgagcgcgcgacgaagagatgcgcgagcttgtcggccgagagcctgcgcgggccattaagaaaagcctcgatcctttctgagtgaacagaagagggcatcttcagcgcgagtaaagcacgagcagtcgagcacaagagcagacggaccttcgctggtcgccgtcgccgtctgctcgacagcgagcgtcagcgccttcacggcggtagcgagcgcctcagcagaggagcgcggcgcgtcgtaactgccaaagcaaagccagacggcgggcagtagtcccggtcaggacggcgagcccgcgcgcaagacaggccaggtacgccgagaagagggcaagaagaaaccgcacacgaacacccagacgtcgttcttgccgggacctgaaacgtccaacgagcgctcgacccgggcagcgagaagcgggtgccgaccgcgtaggatcgcccaggcggtcgcgatccggcccggctggtcgacaatgcctgcttgcccaacggtgaaatgatggtggaggtacctgcgcagtcaggccgccggacggttaagggtcagccccgcagcctcttactcgacacaagggtgcttgaggctcgcagacgcacatgtcgttgacccctcccgcgcgcgagggcaagaagtaggcgagctcgttcggcccgagcggacggcggaccgtcagcgtctgctgagcccattcggaggacggaaggcgaccgctcggcggcggcgtcagcggaggcgagaagcggcgggtcgaatccatctgaggtgggctatcggagagtggaggggtgggaggtcgatggtgatgggcgcaagcatcttcacccgtacttgaggatcttgccagcgagcgaagacctcagaagatgatgccacccctgccagggctttgagctccggccggcgaagggtacgtgaccaggcggagcgttggttcggtcggttccgcccggctcagggcgaggagggacgagcgccgagcttccacctcatctggatgatacgccctccaaagtcgactgagctgctgcgagaccgtaggaggagattcaatcagtccttgtcccgttggaggtcggtcgagaacagattaactcacctgtcgtcgcctggtcctgtcggctggtcgaaaggcggcggctgcgcgatcgcgtcgagcgaaagcggccgcctggttcgatccggctagagcgctcgaaaccaccatcctgccctccttcagaatcctgcccaacatgtcccagatcgagattgtgcgtgccgacgctccctacacgacatgcagcagcgacccctatgcagcagcgacccctggtcgaatgcagggtttacgagcctcgagagctgacacgcgctctcccgcccttcgcctttctccctcccttctgccccacgaccctacccgccctctctcagatccggcgctaccagaagtcgaccgagctcctgatccgcaagctgcccttccagcggctcgtccgcgagatcgcccaggacttcaagaccgacctccgcttccagtcgtcggccgtcatggccctccaggaggcctccgaggcctacctcgtctcactctttgaggacaccaacctcgctgccatccacgccaagcgcgtcaccatccagcccaaggacctccagctcgctcgccgccttcggggagagcgtgcgtctcatcgtctcgcctgccttctcatctgccgtggctgaccttctcgcctctctctccaggctaattgctccgccctgaccttgtcgagccaaggcgcgtccctacatcgccgccgccgccgtcgctcctccctttccggccttggcccccttctccctttcatcgacccgcggcacgctctctcttcgacctcgcccgcgttcgcgccgggccgttcttggcccagcgaggagggtccttcctcgggccccccctcctatttccctcttcgagtttcgctccccccattctgctatggcttgttgtgcgttatcccgctctgcgtcgtcgtcagtcaggcaaagcgagcgccggctcgaaaaagaggaagggttcgcgaggttcagagcgagccgctgccaacgcctgcgcaggcccgcacgcacgcgaagcacccccgccgccgccgctcgcccgcacgaccaaccgaccgtcagcatcgcatcggcaaggaccgaggtcgtcttcatcctgcgagcgtagaggtcagaaggtgtcatcaaatcgtgaatgaggagacttggtgcagaagctttcgtaacaggctcggatggtcgaccccacactgtagtcgagcgagatgtatgccgacgagctccttgattgactcttccaggatctgcgacgcggtccagtacctgtcagaatcaggccgactgccaacagaggcgagggccaaaggaggacacgcacgacgacgttgtcaagcacctgcgaaagggcgacttgccgggcggtgcggcccttcgtcgggctctcgctccccgcttgcgtctgatcagcttcgtcgtcctcgagcaggtcgcgcaggtcgccttgagcggcgtcggctggcgctgggctccaaacgccctttctcgggctgtcagcgacgaggctctcgaccttgaggttggccgtcgcctcgtagtgctttgcgtgcgaggtggcagaaaggtcgccgctgctctcaacccggcgagcttggtagggaacgtgcgatggctgttcagcggcgggcgaagagacgggcgtcttgcgcggggagaggaacgaccactttgacttggctttcggtcgaggggtcgtcggtaagggcgatgtcgtcggcccgggtgacgtcaagctggccgtgcgcgagtgagagggtgtgcggaacggttgcggcgagctggttgcggtcggccggtcgggtgtggcgaggaacggcgtatcctggacgtccatgagcacgtccgacaggtgctcctcgacaaggagaccgcgccggcgttcctccaagaagcggtcaaagtcggggaccatcatgcggtacagctcgagcttgcggacctgcagagggcgggaggtctgctagtcagctacgtctgagggcggccagagaagctcgagaacgtacgaggttggcaaacaacgtgagcaagactggctgcatctcgctctggtccgactcgcggaacggatcgttgtccaacagcttgcgcggcttggccagcgcgaccgagtggaagaagctgtcatcgtcgccgttgtcgtgagcccggtcgacgaccgtagttattggagccgactttggccgaccaatctggccttcgtcgtcctggctgagcgtgagccagtcttgtagcgaaatctccggccgaatggcgatcgaggcgaggacgccagtaagagccaggttctcctcgggcgtgtggatgaagaactctcgcagccggtcgtgtgtgcgctgcaagagtttgtcgctcggattgagctttaacattgacgcaatcggcaaggcgtcgccgttttctgtcgccgagagcagaccgagctggaatgccgtcagcgccgggtttgcctcgaaagtggccgtcgcgtcgcggatgtagccggaaatgtcaggttgctcggccgaacgaggaagcatctcgcggacgaggccgaggtagagcttggcctcgggcgtcgagggagaggtctcggcaatgggcaggtcggcctgcatccattctggcagcgatggaggagtcagtggcagcgagccctgatctgaaggcggcatcgtcgtcaagatcggccgtatcgagtcgggcgtccggggtcgagcgaaggatgttgcgctccagtcaccgtcgtcgaccgagggcgacaacagagtgggtaggaggttaatcgccggcacctgcgagccaaccgcagtggcaaagaggttgtggaggccgacgtgcggatactcggtgaggatcgtctggacgagcttgagcgcggcggtcgccgttcgcggatacggcgagccgacgttgtcgaggacgaggtcgcggagggtaaagcggccctgcgatgggtatagcgacgacctgggaatgtgattgatgttctcgagcaggatcatggcgctgctcttgcgccggcggtgcttggcgctcttcttcgagacggatggcggcggcgtgaagcggtcctcctcgccgtcaggggaggccggcgctggcacgaagcggtcggggatcacgggcggaggcggcgagccgccttcatctttgccgacgaggaagtcgaggatgacgcgcgcgagcgggccgtcgcgtttgagggtcgagaggatgatgtcgatgtacgacaggacggcgacgaccgagccgtcctggtccgagcactcgagtatatttgggtagaggacgtggtcgagaaaggtcgtctggacggccgacaggatcgcccgggcgagcgaggcgccgatgagcgtctgaggcgttaggctcatgctcgcatcgggcgtgtcgaccgccggcgagggtgaggacgacgttccgcgcttgatgacgtcctgcaggaactcaaggaagccaaggaagatgccgagcgttgtgcggaactcgtcgctcgtcgatggctcggcgacagcgaggaaagcgtcctcgttctcgtccttgcccgcaggagcagcccggtttccgacgcagagggtcatgccaccgcttgtcgcgatctcgtcggacccggccgtctggacgagcaacttgctcggcagcgtcgagtaggctgcgccaagtgccgcgccgagaacgtcggcaaagtcgttgtcgagcatgaactcgccgagcaggagcttcgtgtcggccaaggggtcgggctcgccgcggtcctcgccgggcgaaaaggcgacgtcgatgaggaacatgatgccggcccgggcgaactcgccgatcggactctcacgatggatgaagcggaggaggtaagagaagagcagaaactcgagctccttcttcgccggcagccccgggtccgacgagacggcggtcactgcctgcaaaggatccggcgatgagctgcgagcgaagagcccggccggcgctgagccttccgaggcagcggcaggtgccggatcggccgcgtgcggacggtgaaacgacttgtcatggaagaacacggcgagcagcgacgggtaggaccggatgcgtttcgtgagcatgcacctggagcgaagggtgtcgcagggtcagacggccgctgagtccttgttcaggtcgtatcgcgcacacacatgagctcgaggactgtaagccgacgtcaaggagccagcatcgccgtcagccatctgctgaatagttcaagggccaccgtcgcgctgagactcacggcccttctcgtagtcgctcggcatcgcggcacctcccgtcgcggctgcgccaacgactctagcctggccgtcaagagactcctctggctcgtcgcccacacagcttctcattagacgccggaggggccgatgcacctgcgatagacataggggacggctgtcagctcaacgcttattgtctcgcgcttggggcgcagctgccgttgccatccgacgcaccgcgttgtggaccaggaaacgctcgtccagcagagcgacgagcaggttgaggacgttgaggacctcggccttgacgcccgagggccggtcggcctctgcaagccgctcgagtaccgaaaggacgtcgtgcttgaggagatactcgaggcaggcgccggtcgagctggggcgaaggagtcctcaggagtggcgtgagcccccatggatgaagacggcagcaggtcctgtagctcacctgtcgtccgtctcgtttgactcgtggacgagagcgtcgaccatgagctggagctgctgcgggacctgggtcgagctgatgccgcggctgagcatgcgctcgtccggctgctcgagcgtctcctgctcaggaaagagcattcgagaagcgtcagatccatcacaagtgcctcccgtgcgagagcaaagcgcaccttgacatgcttccaggccgcggtgaaggacgagagcggatcgaggacggccgcagtcggagcgggcttgcgtccgagcagccgcgcaaagacctcctacgagagcggccggcgatggatgcaggcgagatgagcttggggtacgagctgctggaggcatcagaggaccttggcctacctccatgtcggtgtctgagcttcaagggattgaggagggacctcggtccttgccgatgcgatgctgacggtcggttggtcgtgcgggcgagcggcggcggcgggggtgcttcgcgtgcgtgcgggcctgcgcaggcgttggcagcggctcgctctgaacctcgcgaacccttcctctttttcgagccggcgctcgctttgcctgactgacgacgacgcagagcgggataacgcacaacaagccatagcagaatggggggagcgaaactcgaagagggaaataggagggggggcccgaggaaggaccctcctcgctgggccaagaacggcccggcgcgaacgcgggcgaggtcgaagagagagcgtgccgcgggtcgatgaaagggagaagggggccaaggccggaaagggaggagcgacggcggcggcggcgatgtagggacgcgccttggctcgacaaggtcagggcggagcaattagcctggagagagaggcgagaaggtcagccacggcagatgagaaggcaggcgagacgatgagacgcacgctctccccgaaggcggcgagcgagctggaggtccttgggctggatggtgacgcgcttggcgtggatggcagcgaggttggtgtcctcaaagagtgagacgaggtaggcctcggaggcctcctggagggccatgacggccgacgactggaagcggaggtcggtcttgaagtcctgggcgatctcgcggacgagccgctggaagggcagcttgcggatcaggagctcggtcgacttctggtagcgccggatctggggggggggtcaaggggctcggaccgacctcgaacgagtggatcatgagcgtgatcatgacggtgctgaagcaggtagcgcggccgtggtagacattctcgcagatggccgagtcgtaaccgacgtcgttgcagctcgagtagacgaggcccttgccgccgttgagcgggctagcgtagacggggacggcaaacgcggtgatgccgagcccgccgatgaggaagccgtagaagaagaggtccatccaccaccagcgggtgaagatggtccggtaggcctcgggcgacttcagcatggcgtcccaggcggtcggctcgaggccgagcgcgagcgcgggcgggccggcggcgattgtgttgatgaagagggcggcgacgggcgagagcgggtagacggcgttgccgttgacggggtcctggaaggagagaccgatgactgcgagcgttcgtaggtaggttgtcagccgtctgggaccagggtaggctagtctcagcttgaggacgtacggagaacgacgacttcggcaatgttgcccgacagcaggaacagcaggaacttggacaggttggttagaacgccgcggccctttttgatggcccgggtgatcgtgccaaactggtcgtcggcgagaacgacctcggcagcgcccttggcaacgtcggagccgttgaggcccatcgcaaagccaatatcggcgcgcttgagggcagggcagtcattgactgcaggagggcacgaggaccgtcagcccttctgaagctcgagcaggatgctcacactcccgcagccgactcacctccgtcgccggtcatgatggtcgtgcactgcatgccgaaacgccgccggcggtgaatggcctcgaccatgcggaccttggtctcaggcgcgcagcgggcaacgacgagcgggagctccggcagggcgtcgatctgctcctcgctcaaagcgtcaaactgctggccggtcatgacggccgaggcaggcgagttggcgtcgatgatgccgaccgcgcgcgagatggcagcggccgtcgccggatggtcgccagtgagcattcggggcgtgatgccggccttgtggcactcgaggacggccgagcgcgaagcaggccggggcgggtcatagatgccgacgaggccgatgaacttgaaatcggtttcgagctcgtcgcggggcagggccttgatctcagcctcctggccaaccggagcgagcttggccgagagggcgaggacacgaagaccctcgccggcgagcttgtccatgcgggcaatgatatgagccctgttctcgtcggtgagcgggatctggttctctgggttgaggccgatgtgcgtgcagcggtcgaggatccgctcgacggcgcccttcataaagatgagcatgtcgttcgtcggctccgtctcagagacaaacttccaggccgtgctcatgcgcttgacggtgctggtgaggcgcggaaggtcagacgagcaaggtcagcgatcggtcgaggacgagcagaggcaggagaggggcgacgcacgaatcgaaagggtgctcgacaaccttggcgtagtggccggcgagggcgaccttggcaggcttgacggcggtcttggtgtcgtcggtgcgcgtcgtctggggcgagaggaactcgccttgcgtctggacggcgtgcgacttcttggtgtgcgtcaggtggggctggccgtggccaagcttgtgggcaaagacctggagggcaatctcggtcgcgtcgccgttggcctcccacttgttgtcgtccgagtgatgaattgtcgccgtgttgcagagcgaggcgcagaggacgaggttcttgagcccctcctccatttgcgacggtcgaatgacgtcctcggcgtccatgtcgtcgtccgagtcctccgagctcgagccggtcggggtcgacctaccagacgtctggatggcccgacgagcagccgaacggacgatgccgcgcgggtagaacgggtcagaacccgactcggcattgtaggcctggccggtaacggtgtcgatcggagcccagtcgcagttatccgggcggacgccgttcgagggcagccaggccttcttgaggaccatcttgccgacggtgatcgtgcccgtcttgtcggagcaaatgtcggtgacggcgccgagggcctcaacggcgtccatccgacggacgagcgcgttcctcgcggcaagctcgcgggtcgcattcgcgagcgtgagcgagacgacggcgatgagcgaggcgggcaggatcgagacggccgtggcgacggcgtaggtcgcgattgagaacggcacgtcgacgaacgcagtcgaggcgacgacgatgaaggccagcaggaacgcaaagccgagtaggatgtaggcgatcgtgttgagcttgacctgaagcggcgtcgtgccggccgtgccgagggcgaccttgatcttgtaccactttgcggcccagcccttgtggttggtcgtctctttacgctccatcgcgtcggcaatcttaccgagctcggtccgcatgccagtgttgacgacgatgcagcggccgcgacccttcgtgacctgggagcccgagaagaccatgttcttgcggtcgccgacggggcagtcgggctcatccaggacccggtcgtgcttcttgacgggtagcgactcgccggtgagcagggcctcgtccgtctcgagcgacgaaagctcatcgggcctacaaatggtagagcgtcagcgcaggccggaaactcgacaatgtggcgatggacgcacaggcagcgagcgtcggcgggcacaacgtctccgttcttgacgaggatgatgtcaccgctgcagagagggagatcaaactggttcaggaggccgctcacagcagacgagagctgccaggcacgactcacggaacgacctcttcgacggcaagcgtcttggtgttgccgtcacggacgacgacggccgtcggcgagccgaccgaagcgagagcggcgaccgtcttctcggccttccactcctgcgagaagccgaccgagacgttgagaacgacaagcgcgagactgcaggcgcggaaccagcgacgtcagcataatgaggcccgagtaagaacgagacgagaccgaaaggcgacgcacatgacagcgccggcaatccagtcctgcgtgccgaatgaaacggccatcgaggcgatcaaaacaatcgtcatggcgttggcgacctggcgaccgagcagcttccagggctggcagtcaaaggggcgaacgtgggcagaaatcagcgatcgaaacgccaagacctatggagcccagagcagactgaccgacggcttctccggcggcttcagctggttcggcccatatttgctgcaggaaggggagacgaggatgtgaggggcggtcagcggcaggtacggcgagcgagcgctgatgtagactcggcagccaagggagagaaggcacgcacgactggagctcctgtgcctgggcgtcggagaagcccttgacggggttggcaccgagcgccttgacgagctcgtccgtgtggacggtgtgaggcgcgcccgggaggggcggcgccggaggaagctcctcaacctttttggccatacgagctgtaagaggggtgagtttgagggagggtctttgggaagacggtcgagtaaggaagctcgactagagtcgatgttattgggcgatcgaaaggaggagaacgaaggcgaggcaagcgagcatgcgggtgacgctcggtaaaagacggcagttgagggggggttccctaaagcacacgcaggtgcagagaaagcgacggggggatgaggacgggtagttatgcggatgagtgttcagaggggacgtcgtcgacttttgagctgcgggctgcgtcgagcgggccgctgcggccgccaagaagaaggctgtttggttctcggagtgtggggctctgccgcgccgacgggccgatatacttgcgctccctcactatcgccgaccagccggcgcctggcccttcaggtcgggccggagagaaggtctggtgaggtcgatgcgtacggagagccgaaggcaggcggcagcggcggcggaggttgccttgagacgtttgaccgtccctccgtcgacagtttgacggccgcctgttctactctgacctacagagacctccatcgagccgacagcacgactcaacagacgagctacatcccttgttctcacagcagtcatcgcctcgcttgcaagacggcggcatcgctctctcacacttcgctagcaagcggcactaaaattcatccgcaaaaagcccgcgcccgccaattctttcagcagaaacatatcaatacaacgttcgggagcgacagagctttagacctgcttctggctgtcaaaggcagcggccgaagccgaggcgggctcggtcgaagggtcgacagaggccggctgggcgccggtcgacgagccgagcgagtagcccgacaacgggccgccccccgagagagcatcaccggccgagcgggcctcaccttccttgaccatgccgccgcagccgacgagctcgccggccttcttctcgaggttgccgagcgtcgtgccgctggtcttcatgctgttgaggctcgagggcgcggcatcgcgcatgtgctgcagaggcgggcggggcggggcgggtcagcagtgctggagatcgagcacaacgccgcaacgacagcaatggacgcacgtgaacgccttcctccttgcggtgctcgcccgaggccttccactcggccgagtcggtggcctctccggtcttctcgacggcggcgccggcgacgtctgacgaagcggcgagcagggcaaggatcagcccagcgagctcgatcgggtgggcaggtcgcgcagcagggcgaggacgcacactcggcgtggccgatgagctgctcgctgacggaagaaggcatgatgagagtggtgatgaggtgtggttgggtgctggaggtgaagggtgatgggcaggtgctggttgttgggaaggagtcgaagggtggcaaacggtccgggagaagatggggcgggctgagaggcatcggcgcatgacgtttcgcctgtcgcctccctcggtccctcgaccgacgccactccccgcacttctcatcgacgagacgcatcataaggcaactcatcatcggccgacgagcttctcgaccggcggctgctcgtccttgccagcgacctccacgtcgcccgcgcccttcttgagcaggccatcgccgcgctcgcgccggcgctcctcgatctcccagccgcgctcccaggtcgcccatgagagctcgctcgcaccctcgctcagggcaagtgcccggcagaagcgcatgcggacgccgaggtcctcggccgtgatcgagatcgggccgtgcgtcgagcggtggtcgacgaagtgcgattggattcgctgaggccgcccgggggggggggggggggggggagaaatcgccatgaggtacaggccccttttaaaaacgaaaggccacaaaggaacctggggggaacagattaggggcgggagattgggaggcggctgttgttgacggtgcaagaagacgttgcggacgaaaaagcgttcagtgtcggaggggaagggggaggagggaggtacgggcgcgagaaggcggggcagcgatttcaacgcatgacagtgtcttcgtcgtcaacgtcgtcgcccggccggcgaaggacgccgcgaacaaaggttccctcatcgacgccgtcgtcgtcgtcgtcgctcccgtacgcctcgtcgtcatagtcgtcgtcctcgagcgcgtcgtcgtcctcctcgagcgcgccctcgtcgtcgccgtcgtcgatcaggatgtcggccgggttgtggaggaccgaggcctcgccagagtaggtgaagccgaggaactctgcctggacagacgacgtgagcgggctgccgtcgatcggcttgggtccaggtcggacagggacgtttgccgacccgatcgagacggcgccgtgcttgtcggccttgcccgcccagtcggccggctcgtcgtcctcgaacgggttggccgactcgacgtttgtgtttgtaaactctgggtcaaagttggcggtcgactcgtccgattcgacgactggcttgaacggcggcgtcacctgcttgacggcgagcatcgcccagtcgacagacttgaaaaaggcgtgctccttgagctcggccgcatcgcgcgtcgcaccgagccggtgcttcgggtttcggttgagcaactacagcagcaggcaggaagccgaacgtcagcaccgggctccacgaccagacgacgagaggacaggaggcccggacgcacccccttgacaaattgcttgccgtcctcgtcaatgacgcctcgcgggaaacgaatcttgccgaagcagatgttctggagggcggccagacgagcgattagccagaggaacctctcgaaaaaaggcggcatcgaggaaaagagggagcgaccgaccttgtacatctgctgcgtgtcctcggcgtagaagggcgaccagccgcagcacatttcaaacagcaggacgccaagcgaccagaagtcgacgagcttcgagtagccgttgtcgtcgagcaggacctcgggcgcaaggtacctatcgcagggcgagagagcgcgtcgtgtcagatgccagtcgtcggacgggaggacgcaaaaggggaaaggcagcgcactcggtcgtcccgcagaaggtgtttgtaagctggtctgaggcgaggtcaggtttcgagaggccaaagtcgcacagggcgacgtgaccggtcgcatcgagaaggatgttctcgggcttgaggtcgctgcgaggtggaggcatggagggggtcagtctcggaggcgcgaagagggaagacgaggaggtaagacagtcgcaccggtagacgatgtcgtacttgtgaaggtgctcgagcgcgaggacgagctcggcaatgtagaatcgggcgcgctcttcggtaaagcggccctccttctggagatgccaaaaaagctcgccgcccgacttgtagtcggtcacaaagtagagctgcttctcggtctggaaagaaaacttgaggccaacgaggaagggcgagaggagcgaggcctggagaatcttgcgctcgccaatcgtatgcgcaacctccttctttgcgataatctccttcttggagaggaccttcatcgcgtagatgcgcttcgtgtcgcgcttgcggacctggaagacgcggccaaacgtcccccggccgatgagcttgaggaactcgaagtccttggggacgaggtgaactttttggccggcggcgtcaaatcgcatctgaatgcggacttcgccagagacctgttcggtcccgcgcgactggagcctgtaggcgggcagagcgaaggagagagggatgggggtcagctctcggcgagcgcgagtgagagtctaggcgcagaggacggaccggaaccacgagtcgacgacctggcccgaggttaagagcggcttgagctcgcgcatgccgaggaagccctcgccctcttgggcgcgatcgtaaaccgtcaggtagacgggcgactgatcgttgatcaggtcgctgcggggcggagaggggggagggggaggattgtcagcctcgaagtgaagttgtacggaagggtgggggggatcgacgcacaaggtgacctcgtgtttccagacgggctcgcttgcactcggtttggcggcggcggctgaggagagggccgacatgccgccggtcgcgccctgtgcgaaaaactccttcttgtcctcgccccgtggcgtcgtcgccccgcttcggccctcaggcaacgacagcttgccccggccaaagccgacgctccgactccgcgcagccatgtcaaaagcccggctgatcgagcccatgctgaggattccgcccccaaccggcgtcggcggcgccgacggcgtgtacttggccgagcccttcgcagccggctcgagagcgttttcaatcggctcgcgcgagacaaattccgagttttcaaactggacgacgacgtacggccgcgaggtgtcgcggaccgcctcggggatggcgaggttgcggccgcccatgagcttaatcgtcaggtggcctttgatgccaccgccgccgctagacgtcgctggcgagccggtccgaccgggtgaggtcgagaggtgcgaggagccagcggcggcgtggtgcggtgaggacgaggtcgttggcgtctggacgtcgggcgggaacaggccgtgcgacggcgaggccgtgccagagtacgagtgggcgtgcgagagggacggctgcgtgagcgagagcgaggacgcggcgccggcgggcgaggtcgggaggcgccggatcggaggagcggctatgcggaagtcgggcgggtggatcgagagcgacgtcgtgggcgcggcggttgtaccgctgttgaaggcggaggcgggtgaaagggagatgggtcagagcctgtgcgcgagagagctcctagttgggaagcgcaagcgaaagcctcctcgaggagcgcagaggttgggcgagcaattttcgtgagctgtggaggaggccgaatgagagctgaccccttcgacctcgtctccgcctcttgccctctcccatcctccgcccctgcgcatccaaaccctcctttccgccgcctcaaagtagacacgaacccgtccgagacagcgcgcgcccaagccggcggcacaagaccgcaagagcgagcgagcgagcgagttgcgaaagaacgagagagcgagtgagggtataaaaagaagcagggacggacctgctcgccggcccgccaaaaggcaccggaaagtccgccgtcgtcggcgtcctcaagccggagtgaatcgaccctccccctaggccatgagcgtgcgtgctgctgctgctgccggcggcagcggctgcttggtggtggtggtgggcggctcctgctgttggtgcgggtgctggtgctgaggatgctgctgctgctgccgcttgctgttgctggcctcccgccgggtgatgaagcgtgtcgaaagggttcgtctggggctgggaggacgctttgggtgtgacctgcgagtggcgaagaggaggcgggagggaaggttggaggggcggcgggtcagatgacgacagtaagaggaggaggggacaaggagggagggaggagggtttcgagataggctcgagcataaggggagaaggcaggcaggcggctaccccctccctggtcatatcaggaggagcggcgcgtgcgagggatccccttcgcctctcgaacgagggcggctgggagtgtcggccggccggccggtcgaagccgagcagccgagcagtcgggcgccgcaagaagggaggagggggcgaggcgagggcagggcaggccagggcacaatagagaaagacaaagagagaggcaggacgcacctggtccggcgggccctgaggccagaactgggcgtgtccaaagacaagcatgaagggaggcaggcaaggccagtcggaggaagagcaggagcaggagcagcgagcgatgtgtgggtcagcagagcccacccgcagaagccgagcgtcctgcccgtcgagtcgtcggtggagtagacggaccttgagcatcgtgtcaagtcgacgggtctcgcagtcaaagaagtcgagagacggggctgtatgtgcgaggtctcccagcaaagggacagtggagggcgaaggggggagatctctcggtcggcccgaccgtgcgcgggctgaaagaggcgcctccgacgagccaaactacaccctacgacgctcgaccctgctgcaccacctctgccctttacttccttgctctactcgagactgatcgaaggctctggacaaaacgacaggtgtgacctcgcgctttgttattctgactctctcccgaccagcagtcagactcggacaggctggcagggcgaccggccagccagccagccaggcagtctcgctctttctctttttcaagagagagtgcgctcgaggaggccaggctaaaccatgacagaggtgtacagacaagcaaatcggcaggcaaccagggtagcaaggcaggcagacaagcaggtgcaacgcgccatcgatccttctgcgcctcagaagagtccgtccgaccgaccgaccaagcgagcgcaaaagggcgctacgcgacgacgtccatcggcaccggtgccggtgcagccgccgaaggagggggcggcatgtcgtcttcttccccaaacattagcctgagaaaggggggaggtagggtcagcgacaagcgagagaaatgagagaggaggagagagagatgaagaaggaagaggtcgaacttacttcccgcccattgcctggacaaattcgcgacttcgctccgcatcgacaaagtacccataaacccgcgtcacgtcctcctcggccacgacgccctgcgccactcccccttcggcggttttgcggcgcgaggccaccaggtgcgcgggcgagatgagctggagcgcgtaccggagcgaggtagtcgtgccgatttcggtcaggagggcaagggcgggcggggagagcgtgacgtcttcttcttggcagctgcaggcggcgggtggatgagagttaattaagggacgagaggggtgacgaggcgggtcaaggggggggggggacaagcgaagggggtcagcgtctgagagacagaagagtagacgagcgcgtcgagggggactgaccgaatctcgacaatctccctcacctcctccttcgcataccccctcgtcgcaatgatcagcatccgatcgagcaggtcgactgggatcccatgcggcgagcggtagcgcgtcccgcggatgcgcgagacgcctcggttcgaggccatgatgacgagcggtgcgaggtccgactcgagcgcgcggttgaggaacgaaaagcactcaatgtcgagcatgtggacctcgtcgatgaagaggacctaagcgggcaggcgggcgggggcctagtattctagcacgcagcaggcccgcgacactcccccttgctcgctctctcgctccctcttgcctgcttcatgctgaccctcactttcgtcaaaggcaacatcgccaacctgatgttctcgtgagtatgcctctgctttttgccgcgcgtcctctcgaccctgttctgacctgtccccccctcgtaggctatgcctcatcttctgcggcgtcctctcgacgcccggtgccttcccccagttctggatgtgcgtctgtcgttgacggatgggctctcaaagccgtcgctgaccgtttgaccctcttgggccctccttccagcttcctctaccgtgtctctcccttcgtgcgcccaccttctcacgatgacttcccccgcgcccggccctccacctgacgcttccttcttcctccctcccctcctcagacatacctcgccgagggtatgctcgtgacggctgtcgcaggcacgtcggttgtctgctcgcctcaagagtacctccagttccagccgaccaacggccagacgtgtgccgactacatggcgccctacatcagcgccgccggcggctacctgcgcgacccgcaggcgactcaggactgcaacttctgccagatcgccgagacggacgccttcctgagctcggtgcgtacagattcgtgttccctcgttttgccttgtccagcacagcggctgaccgtgtaccgaacggccctcctagttcaacatgtcgtatggcaaccgctggcgcgatctcggcctcatggtcgtcttcatcgtcttcaacatcgccgccgctatcggctgctattggctcgcgcgcgtgccgaagcagtcaaaggcggacaaaaaggccaagaaggcccacgccaaggagcaggccgccgcctcggccgcgcacgacgagaagcgtgtctagacccctcaccctccttcgtcctctctctctctcgttttcatcttcagctacggaccctcttcacgtctctgcatctcagtgctcgtccaagggccctaatcatcgacactccactcgcttcgatcgcacgtccacccgcttcgctctgttctctcgctctcgatacaatgtctcctccccttccaattatctggcgctgctttgcgtcgcgtgacgaaagggtacatacgcaggcattgatcaaaggccgaacagcgccgccataatcgcaacggcagcgagtggcgcgaagaggggcagccggccgtccagcgtcaagcccgacccagagaagctcgtcgagctgaccgagggagcagagcatcgtcagctctgcgtttctcgcgagttgaagggagacctaaaagcagccctacctcggcgtcgtcagcgagtcaccggccccgccagtcgtcgccgacccttgctgagagaccgagacggtgatcacggcggtcagcccgtcgatcgccggcttgccgccgctctcgactgtcccggcgtgattgacgccgtcttagcaagagaggaaaatgcaagtgcgcgcgtgagtggaaattaagactggcatggccctaatggagtgcggtcgcactggaagagttggagagcaggcccgcaacatagacgatcgagttgtcgtagacccagctgaagtaaggcgcactgtcgtcagcagtcaggactacgagtgcgcaagagaggagacccacccattgaaagtgctcgagcccgcgaaggtcgagccgttcgccacggtggcggtgtcgatcgtacgattcgaagccgcaagaccgacgagctgcagagaatgcggctgctggtcagcttgatatcggcacattgcgactgagagccatgagagccagacgtactctatctctgccgagattgtacccgtcagggacgatgtcgtgcttctctgcgagcgagccgggtgtgagcagcaagcgtcagtcgaccgccacttgctgcagagcacgtctgagcaacgcactgctcaggtccatctcgaccgaaacctcgagaaaataggccttcgtcgttgcctgctggtagtatctgaaatggttcccgccattgatcgtctggaggcatgtcctgagcggcacaaggcaagacccctcgtcagcaggccgacaagaacgcgccgagacagcccgaggaccgacccgaagctcgtgtcgccaaagttctcgcgaagcgtagcgatctcctcctctgagcgttgggtgtcgtcgctggtcagtgactgatgaggggagcgcagcacagcaggctctacgcacgcagtccacggtcgtcgcctgtgtcagcttgatggccgatgctcgagctgttgtcgatcgagaccgagccacactcggcaccgaactgcaggctcctggagagcgagacgaccagcagcaagaattgtcaggacaggagctttgcttgaaggggaagcaggttgaggggtgggcctgacaacgcccaattctggaagccgcccccgtcgcccgagtcgacgagaactgcagggtccgatcggccagagagaatgacgttgagaggctcgcccagaccagcgggataagtgttgctaatgacctggcggagagcaaggcgaccgggcaagcagtgtcagaatcaggagcgtgacgccctcgctggccaccccaaccgcgtcagagctacacttcgaccatcgagctgcctcttgcaagtctctagccttgcctagcccctatcgcagctccaacgtcctgaaatctaccagtttgcagtcgaggggatcgacccaggacccctggcagctcgaagcgaggtgaagcccacgtcggccgagccgcgtgaggtctctcagaccagctcactacatccctccctcgccagcccggcatggagagcgccaggctaccattccgcgccagatcacgagcagcaacggcctgagagcggtgttgacagcgacgtacagtgagcgagctcccgccggctgccgagggattggtgaatccttgctgcgcgaatgctacctcgagcgaagaggcagccgctgcaagccagaggcagagccgggccgagatcggaagccaggagtgcatgctggaaggctgtagtagatgctgcggtgcagctagaggggagtgagagagggcagggtgggagtctggaggtcgaggacgctagctggcaagtcgccggtcaccgctttcggagggaggcgcagcacgattcgtcctcctcgtctctgcccagccctgctcagccggctggaagtataggatgcactcatagctacaagtggtagctgcgacactactggcccgtcgcctcaagccactcgttgcgcgaaatcgagtggggatcgaagtaaggagtctcgccgacgacgacggcccggtcgcccgctcggtgctctttgtagtcgaacgtcgcgaggctggaagggccacagaaagcagagaaataggtactggcggtgtacaggagaaggagcagagagcgggacgcactggttgacgacgctgttgctccagatggcgaggtcatttcgagcccactgcagagcgaagcaaaagtcagcgcgcgcagggagggtcccgaagagcaggtcgtcggcgcaccttgtacttgacgtgcgcctcatgcgactcgtgctggaggcggaaaaggtagtcgaggaccgaccggctctcgtcctccgacagctcgttgatgcgcgtcgtaaaggttgtactggcgtagatcgccctctggccggtcacctggttcgtccggacgagcgggtggaccgcctggaaggcgtcgccttggttcagcggcgacccgcgcgggtcggtccggagcgagtagccgccgaggcgggcctgcgtccggaagcgctcggcgtcgtgcgtcgccgttaggccgtcgaggaaggcgcggtaggccggcgtcaggctatcgtacgtgtggaggttcgagtgccagagcgtgtcgccccccgtcaagggcagagtgtgcatctggaggatcgagaagagcgcagggcgcggctcaaacgagacgtctgtgcgtgagaggacggtcagaaggagcaggtcgatggaggaatggctgacgcagtaccgtaccagagtgccagcccttgctcgtcaatccccgctcggcaaacgagatctggcggccgtccctcgccggttgcgaatcgatcttgccgagcggcagcccgctctccgaaagctcctgggtcgggtgactagatgcgttcccgtcaatcacttatggaggtgggttgaaggggccccatcagactgacatgtgcagcgtcgagtcatcgggcttgccagcgagctcgcccaagagaagagcgaggcggccaatatccttgggcacgatgtcgtcctgctcttggaagaagacgacgccactctgcgagactgaatgagcaaagtcaacaaccaaattagcctcacaacgacaagtagaaggcgtactccaccactcaccgagaatgacgaggtcgtgcagcagaccatcacgctcttctgtcggcaagccaaggatctctttgagcttgacgcccttgtcaaagcggaggccgagggctggcgtgagctccgtgcgcggataggcaactggatcgagcgcgcccgtcgggacgagaggcttgttccggagcttgtcggagccggcaaaggtggtcaggtcgtgagacagggaaggtgcagacatagagggcatagcggagggaggaagaggcgggcgagctagggtggtagtgagagaggaggcgctgattgagcgtcagcagcagaagagatgctaatgggagccttcatcagcgactggacttctggcgtcagtgaggatgaagaagcggcagatcacgtcttgtctctgagcgatgtcgtcggaggggctggaggaggcggagctgaccgacgcgacgattgctagctgagtcgacaggaaaggtggtgctggcctacctccagccctctagcgagctcgagggcctggtcgacgcgtctcgtaactggccagattatctccccatcagggaaccgtcctccttgtctgtcgatgaccccggtctgctggccgtcgcaccgcgccgccctctcgagcaggaaggcgcgccgtctgcagagccggtgcgacctatgaaccagcgagtcaagtatcggcagccggatcgcctcccctcgcatgtcggcgtcctgcttggccagctcgcctgctgaggaggtagtcagcaggatcgcgatcgtgctggccgacgcttctggcacgcgtcgcctggccctttcgtatttctctgccggcgcctccgtgcatgtcgggcgcaggcgcttcactttccgcctcgccgtcagcttccctggacccaccacccgaccctcacacccttctgccactctcgcgttcgcctcgcatcctgttgccaaagctgtcttcgctccgcttcgccctctcgcggtccgctcctctcaccctctgagtaccgcctactctacacctcccacccgccatcccaccccacccacctcctcccaatgatgcaacctaagtattccacttcgcagttttcactctaccgtttccccttcccgcaagtcggggtccggcccgtcaaacggctggccattctgccctactccgggccattcaaggcgccctctctccctgccactatcctccacccggcagttggtttcgaaccccgctaccgggaggaggccgcctcggtcgcttcagggcgatcttgatggcgcgggcgggtcgacgtggggggtgccaggagggctggcgtcctctgggcgctggcggatgggaacgaatgagggcctttttcttccttggatgtctgagctcccacctacccctctcgcctcttctgtcgcgtctcctgcaggacagaacgctgaccaccttgttgctttcgtctttgaagcagctcttttcgcttctcccttccatgcctttttctctcgatgccttaattcatgctccctttcgcagaatatcgcttgcgtttttctgaaagcaaggaaaggtcagacgcgaatgtgcaggcgatcgtcagcaagcacgcgttgacccggcgtcagaacctcatggcgaggagagcttgggacggcgggctgctgatttcccccgcttgcgcttccggccgctaagtcgctcgtgctaaagtcatggctacatgttggagagcggaaggaggcgagacggggagaccagatctaggaggaaggagccgaggggaagggaatcaggagaagatggtgagattggctactcgccggtgatatgagcgtcggcgaggctcttctcgaggttggccggcttgtcggcgtcggtaatgcgcgtgagctccttaacgaacgtcgttccccagcgctctgccgtgtagcggtcgacgtatttgctcagcttggtgtagttgtcggcccggtcctcggcgcccatcgtcatggcggcgtggatggcgttggcggtcgcgtgaacgtcccacgggttgatgatgagggagccgttgagcgattgggcggcgccggcaaactcggagaggatcatcgtgccgtgccgctcggcctgggtcgcaatgtactcgtacgagacctggcggggaggggaaggtcagcaccaaggtcgatccagctcacgacttgcgcaacgtacgagattcatgccgtcccgggttgaggtgacgaggcaggcgtcggcgacggcgtacatcgcgacgagctcctcgaagccgaccgacttgtgcataaagtggatcggcataaactcaacggtgccgaaccggccgttgatccggccgacgagctcgttgacgacggcccgcaggttctgatactcctcgacgtcctggcgcgaggggacggccagctggacgaggacgacctgagagtaagagaggagagtgttagtcggagggaagaggcgcgggagagagtcgagtcaaacgacatgccgcaccttgccgacccactcggggtgctcagtcaggaagatctcgagggcgtgcagcttctgcgggacacccttgatgtagtcgagccggtcgacgccgacaatgagcttcacgccctcgaagcgctgctcgagcgccttaatccgcttctggacggtcggcttcttgagggcctcgtagaactggccgggctcgatgccgatcgggaaggtaccgacatgggcgtagcggccctcgatgaagacgccgttgggcatcgtcgagaggccgaggatacgcgtgcaggccgagaggaagtgccgggcgtagtcgtacgtgtggaagccaatgaggtcgcagtggaggatgccgagcaggatctcacgccggacgggcaggatgctggaagaaggcaaagggggtcgtcagctcgagtgcacaggcgactgctggacggacgaccgacccaccggtagatctcggacgacgggaacggcgtgtggaggaagaagccaatcttgatgtcgttgacgccgagcgggccgatgtcggccttgcggtccgacttgggcttctcgccctggtcctcggacgcaccggcctcgatgccctcgacgacgcggccgagctccttctgcgtctcgctgccaacgccgtcgccgccaagcgtgccctcgggcccggccgactggccagcaatcagcccgcggaggagcatcggcaggagcatcaggtggtagtcctgaacccagaccatgtcgcccttctgaacctgcgacaggacgacctgggcgaacgtcaggttgacggcccggtaggcgagccagtgcgactcgtcaaagttcatctctcccgggtggtagtggaagagcggccagaggatcgagttggagaagccgctgcaaacgggttggaagagactcgtcagtcggagagtactgcgacggtggccggcaagagaggggacccacttgtagtgcttgtcggcgacgtcgtcgctcaggtagacagcctggcactggaactcgtccatcagccgctggttgacatgcgcgcggtccttcatggggatctcgataccaggccagccgactgaagaaggaagacgcggtcagcagccatcagaccgattccaagagagaagcgaggaacgcactccaggtgaagctcatcgtcttcttgcagcccgacagggccgacacgaggccgccagacgacatcttgaagtggtactcgcccttgtcatccttcgagatggtcaccggcagccggttcgagacgacaatcagccggcggtcctcttgctttggggctgtagagcgggcaaacgtgtcgagagaagagggtcaacatctgcgaggcgcaacggttcggggccaccccagtggcgtgacgtcccactcgggaggttcggcagtgactgagacaggccaggactcacactcggacatagtacggtcgtggagagagaaaaagagacgggagagagggcagggtgcaggagaaggacgaggtcggagggacgaggagtgcgaaggcgcggctgggcaaagaacgaacgaacgcgcgcgagcggcggcaggctgctggctgccggcccgccgccgtcgtcgtcatgcagggcagcgcgcgcgattccccgcagccctctctctgaccccgcagaaaaagtagggagcttcgacggacggacggacgggtcgagtacgagcgggtcggggggcgtgcctgacggacgggcgcctgctatctgcctctctgaacttgctgctcgtgcagctgctcgaggcagcctctcgagctctcgaaggtcgtctctgcgcgagggatgagagaagtgggccccgcacttcgtttgcggcagagcactccgtcgagtcgtcaagcgatatcgcccgccaagcgtcgtgtatctggcagaagatcagtcatgacagcccagaagagtcaagcaggagagtgggatgaggggaaggtgatacagtgcagcgcacgtcttctaacagggagcccttgggggatgcgtatacgtgaaggggcggaccgagcgagggcgtgcgagagtgtgacagagaggcatgaaagggtagacgagaagagcgtaacgagagcgtacaagggacgagagggaatgaggcagaagacgagtccattggtgggaatgtagagttttcgcaggtggtgatagagcggaggttgggtgggcagggcggtggtgaggccagagtcggcgacggcggtcggcggtcggggtgtgcgcgcgagaagggggagggatctggctttggagaatgcggagcggcagtcagcgtcgacacgcactttgagtcgtcgaatgcagatgggaacgaagtacagatgctttccttgcgtgtcgggctagctcagacggcgagcgccgtcgccgagctcgtgcgcaggaggtcgccagccgggctgccagcctccgacgtcccgccactgccgtcgctctcgctcccgtagctcgggatgctgccgagcctcggccgaccgagctcggcccgctgacgctcctcctcgtcctggctagcggcggccttgcgcgcaggcgcgttgagcgacgctcgacggcccggtgggggcgcttcgcgcccgaagccggcgaaaggcggcgaggggaccgtgtaggccgagagcttgcggccgaccgagtggtgattcgcgggcaagctgcctcggcgggccaacgccgaagctggtgggccttgctggccggtgctggaggtgccggtgacgacgaccgagcgattccgaccgctgactgagtgggcgaaggccgggtggtttcggagcgacggcggcacgggcgcgtctgtcctgagggcggggaacaacgtcggtgtcgaggctgacggcggcgtcgacgccgtcgacgagtggtgcgcggcggccgtcgaccggagcggcgggtggatgtggctcatgctcgcgcgcgagccctgcgggtcgagcgagaaggacgaccggtgctgcgagtttgaccgcgtccggctgaaggccgaggatgacgacgtcgcggacgaggtcgagccatggtgggcgagggtggcaagcgacggccgcctgctcgctgacaggtgggcgaacggcgatgaggctgggtggagcggctggaggggcgcgtagggcggcgcagaggtggggagaatcgcctcgctgtgcgtcaggacgttcgggagcgaaatggatcctctccggtcgcccgacggtgccggttgaggcatgggcgacggccggaccggatcctgctgcaacgccgccgccgccgcctggccttctgacgagagggagtggacgaggctgactcctgctgatgaggacgacgatgccgtcgggaactctgggtactcgtaccgttcgcgctcggctatcggcgtgcctggcgtctggagcgtttggccgtcggcgtcgatccggccgtagacggggctcgggttgacctcgtcgccgtcgtcgtctgcgaggtcggcgacgtcccagccaggcgcgctccctttccgcgggaggcagtaggccgggaagcttgaggcagggtagaccggcttgaccaggttggccgccgcctggggcgagtcaaacgcagggaccgagccgaatgagaaggatgagagggccgagaggacgccgagcgtgcccgggtcgacgaaggccgggagcgtcggcgtcggcagcggcggcgactcgctgtcgtcgtcgtactcgtcggcagacgacgtgggcgacatggctggacgctggccgaagggcgggcgagtagggtgaagaggcgcggcggcggcggcggcggcgggctgaacgagaaacgtcagggcccgggctggcgcaggactgcggtcggtgcaaggaaggcgacgggcaggcggagggcagggcgcgaccccccccccccccccttctttcctccactcgctctcccactcactcttgggtcgctccgcctctctcctcatgatcaaataaacacctcacgaccccttcctaaagctgcatgatttatctcgacattgactctaccttgcctgagcgagctcgaaagacgctgaggaaggtgagagagcaagcagtcagcagctggcaatgctgccgccgagacgctgctgcagtcacggcacagatcgccatcgaaagcgttttccgcccgcggccgcgcacgcagtggcacactccgccgtcgccggacgagcctcgccctctctctcgtcgtcattcaccttccatccgcatcctctcgtcgttcgccactcgttccttctagatcgtccgatctctccgaatcttccgccctagaaacctatcctcctagcgcacctcgcgtacgaaaagcatggcgcccctgccatttcttccggtgctctcgcaggccggctcgttctcggccgagctgctaccctcgctcgctgccctcgcccccatcgtcgtcccactagcggctctggccgaggcgctgccgtccttcggcccgcgggctgcctactgggttgacgcttcgagctcgagcgacgccgatgccatcaccgaggccctcaacaacggcgcgggcaaggccgtcgtcggcgaggcgctgctcgccgagctcgccggcatcgacgcctcgcgcctcgtgcttgacgtcgctgctgccgacctcgataatgtcgcagaggacgttcgggccaaggtcggtggcgtccacgtccgcgtcgagagcctcgacgtccagctcgatctcgtcaagagcatcaagagcgccttcccgacgtcgcgctacgccgttttccttgcctcgtccgcctcgagcccgccgacgccggctcagatcgccagcctctaccagacgtcactcgtcgttgccatcccgacggcccagctgtcggcgagcgccacgtcgtctgacggcaagctctcgatccccgaggcgttcctcgcgccgctctcgaccgaccggcccgacggcctctacccgacgatcgtctcgtcctcgacccactcgtcccggccgctcggcctcgtctactcgtccaaggagtcgatcgccgagtcgatcttgacgctcaagggcgtttaccagtcgcgcaagcacggactttggcgcaagggcgagacgagcggctcgacccagaaggtcgtccggatcgagaaggactgcgactcggacgccgtcgtcgttgaggttgagcaggccggcagcggcttctgccacctaggcacgacgacgtgctttggcgcgggcgagctccgcggcgtcgccaagcttgaggacacgctcgtctcgcgcatagccgacgcgccggagggctcgtacactgcccgcctctttggcgacgagaagctccttcgggctaagatcatggaggaggccgaggagctctgcgatgcgaccgagaaggccgacattgcgtttgaggctgccgacctcgtctactttgcgatggcccgctgcgtcaaggccggtgtccagtggcgtgacgtcgaggctgcgctcgacaagaaggctggcaaggtcaagcggcgcaagggcgacgccaagcccaagtgggagtcaaaggtggccgaggagctgcccaagaagacgaccgacaccccgaccgagccgaagccggagccgcccaaggcggcgcccgtgccgatcccgccgaaggagcagaaggacccggcggcccccattcggatggcgaccgtgcctgcgctctcttcgctcagcaaggaggagacggccgccctcctcgtccggcccgtccttgactcgaatgcgatgatggccaaggtcacgcctatcatcgacgccgttcggaacggcggcgacgaggccctgtccgcgctgacggccaagtttgaccggctcgagcccgaggtcctcgcacagggcaacgtcctcctcccgccgtttgcgcccgagtcgatggtgattccggacgacctcaagcaggcgatcgaccaggcctacgccaacgtcctcaagttccaccaggctcaggccgagacggagccgctgatcgtcgagacgatgcctggcgtcgtctgctcgcgtttcgctcgggccatcactcgcgtcggcgtctacgtgcccggcggcacggccatccttccctcgtcggccattatgctcggcgtcccggccaaggtcgccggctgctcgacgatcgtcctcgcgacgccgccccggaaggacggcagcatctcgcccgaggtcctctacgtcgcctcgctcgtcggcgtcacctgcgtcgtcaaggctggcggcgcccaggccgtcgccgccatggcctacggcaccgagacgatcccaaaggtcgacaagattgtcggccccggcaaccagtgggtgaccgccgctaagatggttgtccagaacgatgtcaaggcgctcgtctcgatcgatatgcccgctggcccgagtgaggtcctggtacgtctgctctgcattactcctcttcccaatcttcctgcggacgtcgctgatccggtctctgctgcaggtcatcgccgacgccacgagcgaccccacgtttgtcgcctcggaccttttgtcccaggctgagcatggcgtcgattcgcaggtcgtgcttgtcgccatcgacctgacgtcggagcagctgtcggctatcgaggaggccgtcgacagccaggcgcgcgccctcccccggtgcgatattgcgcgtgtcgcgatcgagcagtcgatcatcgtccaggtcgcgacccggcaggaggcgatggaatttagcaatgagtacgcgcccgagcacctgatcatgcaggtcgacaaggcggacgagctcgtcccgctcgtcattaacgccggatccgtctttgtcggccactggtcgcccgagtcgtgcggcgactatgcgtcgggaaccaaccacgtccgtctttctcttgctctgctcactccgcgcgcttccgaggctgacgcctgccctcctaccctacagactctcccgacgtacggatttgcgcgccagtactcgggcgtcaacaccctcaccttccagaagcacattacgtcgcagcacctgaccgaggagggcatccgcgccctcggcccgatcgttgtccggatggccgagtgcgagggcctcgaggctcacgcgtgcgtctttctttgcccctgcggcctttcttttgccacgatccaaagttgacctttgccaaccctctcctcccacagtaacgctgttcgtgtgcggctggcggcgctcaagaagtagtggcaaatcggagcatcgcatgatccgttggactcatactggcacgctatggcctctgcttgattccttgcaaggctctgtctcgacttgatctcgaaagcaaaaaccgaagtcttgtcgggaagatcggccgctggggagggaaggcgccgcccgccggcctgccaccttgccggacgccgcctcacgaacttcaccctttgtctgcatcctcgccgcccgcctgttgctccctcctccctcttcttcgccggacctacctcgccgtctttggtcattcgagaccagcagtccatgcccgtcgacgccctcatcgctccgctctcggctgccctcctcgccggcatgtcgttcctgaccgtcgtccgggccaagtcgtgcgtccgagaccagctcgacccaactcgagctgccgccacaacctagtcttcggaggacccggagcggctgagagagcgacaacactagcctggaagcttgagctgaccttctttgccttcgaattcgacaggcgcaaggctcgcttctacatcaacctagcgctctacgccggagctctcttgacgacctcggccctcgccctcggggtcgccgtcgccctgacgatcgtcggaaaggtgcgagcgaatccactcgtctcgccggcctgctgctcgagacctgcacgggaggcacgagcgtgctggcctgcgtccgtctgaggcgggcagctcgacaaggcctcaaggttcttgcctgccccggctctgaagcttccctagtcactgacgtcggccctggccccttccgccatcttcttagggcttcaacacgaaccactatgtcgcccgcatcttctaccacctcgcctcaccggcgaccggtcttcgtctgcgcgtcactaactggcagaacctgccagtcgagggcgagcctgcgatcatggtcggtaatcaccagtcgtttgtcgacatcctctacctcggccgcatgttccccaagcggggcgccatcatggccaagaaggagctcaagtggatgccgttcctcggctggtggagtcagtgccttgccttgcttttcagttctcaagcccgactgacccccccttcgctcgcctctggccggcttcgcagtgagcctctcgggcacagtctggatcaaccgcggcaacacggcctcggcactcaaggccatggccgccacggccgaggacatcaaggtccagaagaagtcgctcttcatctttcccgagggcacgcggacgctctcgcccgagctcacgctcaagccgttcaagaagggcgccttccacctcgccgtccagagtgggcttccgatcgtgccgatcgtctgccagaactacgagggtctctttggcaagggccactttgagagcggcgagtgcgaggtccgaagtgagtcgggacgacgggcgactgagacgcacgacctggccgctgacattgagccttctttcagttctcgacccgattcccaccaagcatctcacctcggccgacgtcacgtcactcgccgagcgcacgcgcgaggtcatgctcgccgctctcatcgagatgggcaacgccggcaagccgaccgctcggtcttcggcctcgaacggcgccgccgctggcgctgagaccgaggttacgcctctgctggccccttcggccgttgatggcgcggcctcgacgtcgacgtcgacccctaccttggccgaggttgcggccgctccgcgcggaggtgcccggagcgagggcgagacggacgacgacgacgtcgttcacgtctcgcactgaggctcgtctgacgagaccagtcacctcgcccagtgaggcgacaaaaattcactttagggcgcctgccgggcgcggcgtcacaagcgagaggtccttagcgagggcaagctggctcgcgccctccttgcgcgggcagcgcaccgtgcgacgccaccccccccccctactctagacaccccggcccttatacccccttctccaccccgggctcccaacaccccaagcgtacagtaccttttgtgcgcgcctcgcttgcgagcgtgcacgcccccaacccttcgcccttctctactctacccttttgaccggtcctgtgacccttctctctccgctctctctcgctcgctcgcgcacacgctttaacgtccggcaccttaaacgacccctcttttccccttcctgctctccctcaccgagggaggacattgcgcgatcctgcccccctctttttgcgactctttgacttgccctcctgccttgcctgcctgcctgccccgcctctctctttttgcttgctctcgcatgtcttgctgcctatgcaccgagccggtcctgcgagcgagcgagcgagcgcacgtcttgtgtctgaagtggacaatccgaccgctggcgggcgtcaaggcgaaagacgtcaggcggtcggtcgagcccctttacgcaagtcgactcgcggccgcgccatctcgactgaccgcccccgaggaggtgcgagaagtcttcgcgccggttttaagggccgccgtcgatgctggcgagggcctttgtcgaggaggaggcaagctcgctgaggaggagcgacgtctggcccagggcgaggctcgagtcgttcatcgataccgcgagccgaccgtacctctcatacgctgcttgcgacatctccgcaatcgcctcgccgtccttctccgccctgaaggcgtttgctgactgctgatggaggtactggagatggatcgcgccgaccgacatgcacgcgagcgagagcgcctcgcttgcggtcgagctccggcgcggcgtgctgaggaaggcggggatgtcgaggaaggggaagaaggcttggacggattggccgactgagtcgagcggccggtcgggggccggcgggaggtgaaaggcggcgcataggagttgggcgcaggacgtgtgggacaatcttgaggaagtgcgtcatctatcggcgagccggccgaggtacaagtgaagtgagtcgtcagcgagtcgcacgagcgagaggaggccgtgctctgcggggaagcggcgcaccaggttgcgttcctctgagtccggccagagcaggacgagcgtcggcgtcggctcgacatacatcggcgccaacccggccgccgtcgttgtcagcgcccactcgcgctgctgctgctcggactggacttgcgagccgatgagctcgagcagttcaaacgggagcgtcgtaaattgagggccgccgttgttgtcgctgctgctagcgctgctattgggcccttgacattgcgcgccgccgtcctggcctagcctaacgacttggtcctgcgcctgctgctgcggaaggggagcccaaggcgtccctgcccagcttccaagttcaagcgtcggatgcgtctcgagagccgtcaaccctgcttgctgctgctgtagaggggacgacggccagaagaagacgggggtgtatgctggagggagtaggtaagagagccagtcggccggcgagtcaggctgcggcggcggcggcgattgcggcggagagatggtgttggaccaagccgtcgggcccgtggtcgtcgaatagccgactgcagactgctgctgctgctgctgcacgagatgtgagcccctgtcgtctccctgctgctgcccccccgcccgaccgctgccttcatcccctccgctcgaagctccctccgcagcacccgtcgctggcaccctcgcgaaacgcttctccaatgcgagctcgactggccagagacactctttcccgcccttgacgcaccgcgcacaggcgtacgtcccgttgggagttggatggcgctcttggttgcaggcacgcttgcgttcacggcagacgaggcagcctgcgcgaggggggagggaggagagtcagagggagcggatgagagagagggcggcgacgggggacggaccggtccgggagcgcttcttgggcgcaccacgatactgctgctgttaaggaggacgaggcggccgtcgtcgagcctgatgcgactgtggctggctggcttggggcgccgggcatctgctcgggttgcgaggtctgacgagagcgagagcggtcgtcggtttgtgccagctgctggcgagcaggtggtataggtcattattcgggccaaaaggcgcaaggccgcgagactggaaacggcgcggttcaaactgcggccggccgcatcatgcgtatggcccggtcattcaagaagtgagcgaccgctatgtgaaaaggacggagtacaaggataattcggcgaggccgagtagcgggcgcggagaggcggttgcctcaggcgatcttgtcgttctcgaagcggtcgcgtcgcaccctgcggcgcacctcggccgacgtcgcgagcgagacctcgtccgtcacgtccactagcgggtcaagctggaagcggcgcgaccatgcgaggtcgacgacagactccgaccaagcggaaggacaccgatgaaagctcgacaagcggcgggacaaggcgctcgagacgcggcggaagaatgcgtcagtcgcccgtccggctccggaggcgaagttgcgatcgacgccagcgagggaagcgacgtcgagccgaaataaaaaaaaaagggtcgcgtccctgcctcgccctccctccgagccgcctgctctgctcgtcaacaggcctcctcgctcggccacccgcagcctcgtaggcgcacggtccgacaatgattcttttgactgccctttaagaggaagaagcagcctgccctgtccttcctctcgtgctcatccagctcacccaactttcgcccagcccatgctttacagctctctcacccacaccctctcccagcccgcagccaactctcgtcgaccccacctttcgttaagccagtcatgatgtcttccctgacgcctatctcggcagtggtgagcactctcgccaccgacggcgcctctagtgcgcccgtttcgatctcgcgcgtccggagaggcttcctgcttgccgttttgtgagtcgctcgcgtcccaagctgtcccttactcgcggtttgactaaccgactgcccatctctggcctacagctgcatcgcgcagtttgtcgacgtttacagcgcgagcgccgtcgtcctcggcatcccagaggtgcgtcccgccgacgccatgacgcttcgccggctgctgctgaccctgcgccaatggccttccccgacctccttctcccacgctcggaccgccagatcgccgcccagctcgacatgagcgccaacgagagcacatggaccatcaacgcctacgtcatctgcctcgcctcgtttatgcttgccgccggcaagatctcggacctctggtcggccaaatacgtcttcatcggcggcctgtgagtcgcgcttgccaagctgtcacaacctcgtcccgctagacgatgcgctgacacccttactctcggttctcccaccgcagcgcctgggtcggcatcttcggcttaggcatcggcttctgcgacgacaaggtcacgttctttgtccttcgcgcgctcaagggcatcggcgccgcggcctgcatcccgtcggccctccacctgatcgtccacatgttccctcgggccgacgacgctcactttgcgctctcggtctttggcgctagcggcgagattgccaacgtttgcggcttcctcctcggcggcgttttgctggtgcgtgtcgacttgacctggtttcgcttcgccgcttcccattgctgaccagcacaccttcgctcagcttgcctcgtgggaatggatcttctggctcctgccgccaggtgcgttggctcgggcgcgccatcctctgacagatagatgacctgatgaccgcccattctctccgcagtctgcatcccgctcgccatcgcttgtatcttctgtatcccctcagacaaggacctcaaacagatgcactacgacacgctccgctacgacgccgagacgggcgacaagcgagcgatcatcctcctcgccgagctcgagagcttgccctatccgacctcgttcgactatgtcggcaccctcctcctcctgggagccatggtcctcactatcttcggtctgaccgatggatccgagggcggcggctggtacgtccctgcgactcatagccctttgaaggcgcaaacactgagcctcctcttcttgcgctcctaggctccggccgccgccaatcattacgctcatcatcggcgcccttctcttcccgctcttcttctggtatgaaccgcggatcgacccggttaacgcgctcatcacgcctgccatctggaagatcaagaacgtcacgccgctcatgattgtcgctctgacaccctacgcgtggtggtacggtgcgtcgcgactgcattcttggtgcacgcccacccgacgctgacacaagccagcttctgcctcaccaatactcagccgttcagttcaactatgccaacattcttgccgagtggggcgtcaactcaatcatgacggccgtccacttgtgcgtcgcggctcattctgctcctggagaagggcttccatcaactgacacgcttctcacgccctgccgccagcctgcccgtctcagtcggcggcggcgccgtcttcctcctcgtcatcttcctcccatcctggccgtcgctcaagatccgcatggtcggcggctcgatcctcgcctgcgtcggctcgctcctcctcgtctttggcgagaccgagggcgactactggccgcttgtcatgccaggcttcttcctcggcagcctcgggacagcgctcgtcttcatcacggtcaataacgccgcgatgaagagctcgccgacccagcacgccggtgtcgtcggcggcaccctcaactcgacctaccagctcggcgccgcaaccgtcctgagcatcgccgccagtctcaaggccaactatattgagcctgcgcccgagggagtcgctggcagccacggtaccgtccgctggagggggtgcgtccttgctcgtcttttgcctctcgctgcaattgtgctgactcggtcactcgcctccctcctgcagctaccaagcaacgttcggcttcctcgctgtcctctgcgctcgtgagccgctctccttcctgtctctcctcacgccgccttgctgacagcctgcccctccctccagtcaccggcgtcctcgtctacttcgcctacgaggaggacgtcactccgccagcagaccacctccccccgcgcctacgcccgcgcccgcgctcgcgatccccccagcttcctgctcgtcaacccgcgcaagaaggctggcaaggagcgcctcatcttctggttcaacggcggtccggtacattctccccctcgtttcgcttggcttgacttcatttggtcgctgctctgccgtcgttgcgcacgttgacgtgcgcggtttggggtcgcgggtcggctgtgcgcatgcgctcgactttgtcgggattggccgctgactttctaccttcgcgccttgtcgcgctggcactgcgattgacaattagggctgctcgtcgttcgacggcgcgctcatggaggtcgggcccttccggatggacccgcacaacccgggctcgctcgtcctgctcgagcaaggcggctgggaagagttcagcggcatcgtcttcggtccgtctccccttgcctctcctccctaacacacacgagagttccgaagctgacgcggtgatgttgcgccttttatctagtcgaccagccgccagggaccggattgtcatacgcgccgaccgacggctacgtgcacgaccttaacgaggcggctgcccatctcacgcgcttcctcgcaaacttctacaccgtctttccagagtgggccggggtcgacgtgcgtttcatccgaagcctttttcggcaagttgaacgtcgctgacacgtccccttttgtctctcagacgtacttctcgggcgagagctacgccggccagtacatcccctacttcggtccgtctctctcccctctccttcccaacccccctcctcgttcgactgcgccttgccagaggctaacattcgcccgcccgcttccagccgacgccgtcctcaagtcgccgctcctgccggccttccctctccggggcatcgcgatcggcaacggttggatcgatccgcgcgagcagtaccagggctacgtcgactttgcgtattcgcacaagctgattgagaagggcacgccggtaaaggcttcgttgcttcgcttgatcgacgtgggcgcgctcagctgctgattgacttgcgattttgtgccaggccgctgatcacctcgagaccgtgatggccgagtgccaggccgagatcgacaagtttaccgacgtcaacaagctcccggtcgacgtcaaccactgcggcggcgtcctctctgccgtccaagcgcccttcacacagacgtctgtcccccctgcccccgcctcttgcttccgcgtttgctaacccaccgcctggcgttcgattgtgaaagggtcgatggaaacaagatttgcatgaatatctatgatgtgcggcttgtcgacgactacccggcgtgcgggatgaactggccgccggacctggtcgacgtctacccatacctgcgcgtgtgtgccgtcccgcgcctctcccccttcctatccctcacaggctgacactcgtgcgccctcgtccacagcggaaagacgttgtcgccgccctccacgcaaccgagcacgtctcgggctggaccgaatgcaacggagccgtcggcagcgccttgcgcaaccgcgcttcgcccgcctcggtcggcctcctgcctggcctgctggaaaagatcgaggtgctgctatttagcggcgagcaggatctcatttgtgcgcatacggggacggagaggctgatccgaaggctcgagtgggagggcgagaagggctttggggtgagtcgtcggcctggtcttgcgaaggcctgcgtttcagttcggagagggctacgctgacaagcgaacttgacctgatgcagaacgctacgatcaacgactggtacctcggcgacatcaaggtcggcgaatggacgacgcgcggcaacctgacgtacgccaaggtccgtcctccttcctgcgcccgcgtttgcctcctgcgccccgcgggggctgcctcctgccctctctgcgctcgctcgaaactgacgaccaggcccccctcctcgcaggtcgcagactcatcgcatatggtgccctacgacgttccgctcgtcgcacacgacatgatgctccgcttcatgcaagtcgacctgtcgacgctcgtcgccggagggaccgccggccagacgagccgcgtcggctcggccgagaaggtcacggtcgggctcggcgcgagcgggccagccggtgggacaggcgagacgggcagtggcggagagacggcgccgtcgagcggcagtggccggacggcaaccgagtgggagggtgcgtcggacctctctattggtcgtcgctgtttctccgtcgctgatgctgcatcttctctcttcctcgctcagccttctacaacgccggctcggcattcaccgtcctcctcttcatcctcatcgcctgcgctggcttcttcttcttccgcgcccggcgccgccggacgctccttcagagccacctctcgaccggcggccgggccggctcgacgctgcccctgacgcggcgcgacccgctgctcggcggctcgttcgaggagcgcgagccgctcgacaggccgtattcgccctcggcggcgttcggccagccgccaaggctcaacacgccgtctggtcacggcggctactcgccgacaaccggctccgccggcggtggggggcaccggtcgacgctcagcgttagctcgtcgcaaggcggaggacggggcagcccgcgttttgcgaagaagggccggacagtactcgacgaagggagcgagggcgacgtcgtctttgacctcggcgacagcgacgagtcggacgacgacggaaagctccgggccggccgggcgtcctgatgcgattagatgaagggggagcaggctctctctcttttacagacgtcgaggaagagcactcgcagaaaggcgtcgggcggcctaggcatcaaaggggctttcgactgctgcgcgggcctccgcgctctcgcgccgtttagggaagggcaaggggggccaagctgccttcttccctcttgaccaccacccgctctcgctctcacggctcagttctccctcaccaactccatcgctacgacatgagctcctctgccgctccagtgcgtcgtgtcttggcctaaagcgccgtttcttatcgcctcacgctgacgaaggcaccggccacacccccttgtcccagccaacctcgcagcagcttcggcagacgcctcgcctcccggtcgacgttcagctcgatatcctccggtgcttcgtcaaccgccccagggatctcgcggagctgtgtcttgtctcgactgcctgggcggtagatcctcttgaacctgctcgtttctggcaacccgttgctgatcgcgcctgtcttggtcgtcggctgcaggcccagggtcagcgactcttgtatcggacgatcgcctttgagattgaactcgatcagcagtggcagagcatcatcgcgcacccccatctcaccattctcgtcgtctcgatggggtgcggcggatatatgagtccgagtcgctctccgcgttcagcagcctgcccaacctcaagcacgtcaaggatctgccctgggccgaagtttggatactgccttggattcctcagccttctgcagaagtgcgatcgcagctggcgtcgctcaacctggctttcatggaccaaatcggcgccatgcctggcgtcggtgactttttcgacctgcgacgtctgcaaacgctcgacattggcgtcggcgacgaacggctcttcatcgagttcctcaacactatgcctgcccacctcaatcggctcaatctcttttggcctgactggactccgatgagccgcctcgtctaactcgccctgacgcgcttgagtcgcctccacgtcctggagctagacctgcagggagacgtcctcgacggcaaaggcttcagtgccctgctcgccgctttgccagagctacgcgagatcaaggagctctacgaccggtttgatctcgttccggccggacagcacccgacgctcgagaccatggcaaatttcgtcaggacacgcctaccttgcatcaagcattgcaccctcacctcacgaagatctgtcccgagcggcactcggagcacaccgccctgtgctacatttacgatgcggtccgccatacgccaatgcgtttcccatcgctgcggtacatcaatctcgagtctcatgagccggtgtcgtttgcgtcccacgctggccgcgactgattccgcctcggcgggatgtcgtccgacctgcgcgcagtcggccccactctaatcgacgaagacggcctgccgtggcacgagaagtaggatgccgagtagcggccgctggctgttgcggctggcggtgtctcacctctctcgcgtcggacatatgcgccctttccttcgccgtgcggtggtgctgctaagcggagacggaacggtcatcgaggtacagacaaaggattcgatacagacaaatatgacggaccgccccgcaggtggcacgagacaggcacagacagacacgacgaaaagcccccacctgggccttcagcgcagcctcgggcctttgctcgccccacctgccgcctcctcgacggccgccgagccgggagcgtcgttgagcaggccgacgatcgagagccgcttgcgcttcttcttgctgccgttgtcgccgctcgagaccaaggtcgcttcggatgcaaaggcggcgggtgcgacggcctgcacggcggccagggtcggcatcgagaggggcacagtgctgaggctgtaagtcgctggcagggcaaagctcgcctcgagccaaggcagggcagttgtgctggatgactgacgtcggtcgtcgacgtcagggtgcggaggcgccgacggtggcccggtggcggtagcgggtgccgggtgctgagaggcactctcgcgccgccgactgtggccccggcgctccttgacggctgacgagcgagaagtcaagcccgcgtcgtgggctgggccgcccttggtcgccatcttgatcggcgtggagaccgaggctggctcgacggcttcggtcggcgcctcggcctcgtcgaagagcgtctttgacatgatctcgtagtcgtacttaaccttgcgccaggtgccaccaatccagagcatgccgctgatctcgggctcgtcctcggccaaaccggcagcgtccatcttgaccggcgatgacgctggcgcgaccgacgtgcgcggctcgtcgtcctcagcggggagggcggcgggagggacgggtggcgggtgccccttcccctacccccgcctgagtccccgaacctactcatcggcgtcttgctttaagagggcgcatgagatcctagtctgctctgcgagccaaggggtggcacatggcacaaaggagcaggagtgtcgaaggagagcgcggaccacgcgtcgcgcggccgacgtgcctatcgccagcgtctcggcgacccgttcccgcgcgacgagctgccaaagtgtggcatgaacgatgagcctgggccgtaaaggttagtggctgatgcggttggtctgaaacatcaatgcgtcaggtgtcacgaggagtgtttcggcgagagaggcacgggcgaccgacctgttgagccagctccgacgtctccagggaagaagtgcgcgacgtcagagacggtgccgccgaccgagaagggccatgccgcccaaaggtcgaacaggcctggcctgatggtgcgtgaaagcgatggtcgtccgcctcagtcgccccactcgacgacgccgccgacccagacctcccagccctcggccgtttcggcctgctcatcgacccagccgacgccgctatcgacgaagtcgcctctgagggccgtccggacgcggtcaacggtccagccaagctcggcagcgactcggccgggagtgagccggccgccagtctcgagcgcgagggcaatgagcgccgaagagtcggtcgactgaagcgccgtcgtcgtgcatcgaagtgcgagcgagcccttggctcctgggagagcgacgacctcgtagccgccaccgagggggttcatcgtcccgaccgcacgccggacatcgtcgacaccgattgcgccttcctcgacgccgcgccggcgctcgatccggcggaggagatctggtaaggggatgaggccaccgttgagggcccgcgtcgcgagcgagatgtcgatgatctgcgtcaagagcgcatacgtaaagtctgagagcggtaggagggtcgagaagagggacgagagcgagccggacgacgacggatggagcgggccggcgagcgggtcgatgtcgaggtgggcgcacatccgctgaaagtgcatgcggaagacgggatccttcttgatctcctcgcgatgcttgacggcaaactcacggagcatcgaccggaaggtctcgagctgagccttgagcgactcggtctgtgtggccgagacttgggacgaaagcgttgcaaaggccgcattgtgcgaagagcgcgactggagtgacgagataccgacagagcgacgcctgtaagcaagagggcaaacgcacggatggtcagctcaccccgcaagagtgcggcaggcctcggcacgcacatggtgcgacggggccgatgatgggcgaggacgagagacgcggcgggacgcgagatgcgagcgctgggctgaaccggctaccgtcgaaggaccgcaaacgccttgcgattaaggcgcacgacacttatcgaggatgggaggtcgatggcttgaactcggagctctactgaagatcggctggctggactgggtggctagtgcaaggcaagcagagcgacgggtccgggaggcgcttgagcggcgcgccaagcgagctcgtgccgtccctccgacgacgaggaccgctagaccgaccgacctctcccacgctccctccagcccgccttgagcccgtctcaacttttgctatagaccgaaacagctcgccggacgagctcgaagtgcgatggactactttcggtcgctcgggacgtcgctactgcagcaatcgggcgtcgtcctgccgtttgccctcggcgacaaggtccaggcctacgagaacgagggcacgatctggagcctctacgacggcatcaagcgggtgagtcgatggctgtatcgacaagctagggtcggaggagaggccgtttgatgagcttggcagggccagggagcagtcgggcattcaggggctgcgccgtcacctggagtctcggtgatgggcaggcagcgcaggtcggcgccagctgatcccctgggcgccgtgctgactgcctctttgccgctctctgatggccgacaggacgatggcagcctaatctcggtctttgtcttcgatgcgagtctcccgtacgccggccgggccgaccgccgggcttacatacccatagccaagaatgcgctcaagaagatccggagcacgcgccatcccgacatgtacgtccctacgtcgcttgctcggcagcaaccgagcgtctgctcgctgacatctgatgcaatgaccttttccctcagccttaagttcatcgacgcgcacgagaccgagtcggtcatccacattgcgaccgagcgcgtccagcccatcttgacgatcattgcgcagacgtcgccggcgccggaagccgactatctcatctggggcctgcatcgggtgacggtaggtcgtcctgcttgctctgctggcgcttcttcagactgatagacgtccgccgtattgtccctcctgcagcgcgcgctcgcattcttgaactcgcaggcgattgccatccacgggctcgcgcaccgcacgtcatcaatctttgcgacgccgtctggcgagtggcgtctcggcgggctggacctattgagctcggcgcgagaggccgagcgcgaagcgggcgtcatctggacgatgggcacgctcttgcttgggcgggaggagggcatcagcccagaagtgcgcaaggccggctggaatgtgctgaaggagtgcgttatgttgcgcccgcctccgacgagaccctcgtgctgactagccggatgttcacaggtccgaatcgacctcgaacgacgcctactcgctcggcctcctcatccacgccatcttcaatccatcccacggccttcctgccaccgtgcagccgccgcatcctgccccgcaaccgtcctcgcgtggcgctatcccgccggcactctttccggcgttcaagaagctgctcaacccgagtccaaagtcgcgcctgacggcggccggcctcctgcaggaaggcggcgggctcggcgagggccggcaaggcttcttcggcagcaaccgtttcgtctgggtcggcgacggcctcgagggctggggtctaaagggcgaggcagagcggtccgagattctccgggcgatccagccgccagcgcccgtcttcccgccggcgttccagacgcacaagattctcccgatgctcctgcactcgctctccctcccgtcctcggctgcttcggccacctcgtcgccgtcgcagctgctccctttagtcatcgccttcggcaagctcgtgcctccggaggactacaccaagcgggtcctgaatccagtcgttgctctgttcaagagccccgatcgtggcacgcgaatggccctcctcgagggcctcgccgaactcgagcctttcatggacgagaagtgcgtccgcgagcaagtctggccgcatctggtgagccgtcttccatcatccgtcttggccgttgcaccggccgtctgctcatcgcgtgtcgctcctttagatcaccggtttcaacgataccgttcctctcatccgcgaggcgacggtcaaggccatgcctttgatcgcgcccaaggtgcgctgcctcttttctttagctgcattgcacaagcagacgatgctgacctcgtgctgcaacgaccactggcactccgcagctctccgaacggctcatgaataacgacctcctccgcttgctggccaagtcgcagcttgacccggaaccgtcgatccggactaacacatgcatcctcatcggccgtatggccaagcacctcgggccgaacactaagcgcaaggtcctcgtcccggcctttggtcgggcgctcaaggacacgtttgtgcacgcgcgtgtcgccggcctgatggctttcatggcgacgatcgacgtctacgagcgcgatgacctggcctccaaggtcattccgtccgtctcggccgccctcgtcgaccgagagaagtacgtcgacctgcgcatgtttcacttgctgcgtcgctcagctgaagcggccctcccttaggctcgtccgcgatcaggccttcatcgccatcaacctcttcatcaagcgcgtcgaggacatggtcgcttccatggtccgtcgaagcgccgggaaacctgatcgagcagccacgcactgactcgtcattctcctcgtacagcccgcaacgattgaggtcggaccggctccgagcgcgtccgggtcaaacctgccgtccctggccgccacagccgccgcccctacgacacaggcgcaggccagctcggcatcttccgtcggcggccaggtcatcagctcggcgggcggcgctgcaggagccctcgctggctgggccttcgcatcgatcaacaagcagctcgcaacttccgacctccagaccgagatggcgacgtcacccccactgccgggagccttttcgcgcgccaccccgatcagccgcccgtcgagcacgagctcggctccagccgtgccctcgtccagccagccaaagggctcatcttccgcctcgtctggcatgaagctgtcgtctggcagccgcgctctgggcggcagcgcaaagaagtctaccctcgacaatatcctcggcgatgaggacggcatcgccgatgcctggggagacgacgccgacaccggcggcgacctgatggacgttgatgacgatgccgacgactggggcggcttcgaagaggctccgacacccttgtatccgacaccggcacctccgccgccgacgtgcaggccagccgttgcgctggccgcacgtagcccttgggatgacctcgcaccgccagtcccgatccaaacgaagccatcgaacgttgcggtcgccaagccgaaggtcaagccgtctgcggcagcgctggccaacctgccgactgtgacgacccccgcatcaccggccgagccgtcgccgcaagtcagcctgtcgggcctgtccaaggaagagaaagaaagggagatgacgcgccgccgtgaggaacggaaggcaaggattgcagcgctcaagggcgggaagtgatgcgatgctcacactcaacacgacactggatgcggggccgggaagtgtacgtactcggctggcctggagggatgtggctgagcgtcggagggcaggcagcggtttggccggccggccgtcggagggacgattcagacgagacgcgcgcgcgcggccgctctatgctgatcgagctcgacgtcagcgcccgctgcctctatcatcttctttccgctgcccccaggtgccgatcgagaagctctacgtcgcgtttgagcgggcgctcgtcaacgtcgtcaacgacgtcggcgtcatgatcaacgacacggtgaccgacgcctaccagcagaacgttctgccgttcgttgccggcctcggtccgcgcaaggcaaccaagctcgttcgcgacatcatcaagaacacctcggtctgtccctctcccttcgcagctcctcgacctgccctcgtcaaacgtccgctgaccgcgaccgcccctgctgcccgcacagaatggagcgctcatcaaccggaacgagctcctgacggccgagctgcttggctcggtcgtctgcgagaacgtcattgcctcgatcgagatcaatcacgacccggaggagctcgagctcaccggcgacgacatcgagggccagcccgacccgctcgactcgacccggatccacccggaggactacgagtttgcgcgcaagatggccgagaatgcgctcgagctcgacgaggacgacgtcgccgatgatcatccgtccaagtcggttgtcaagctcatgctcgacgactcgcccgaggagaagctcaacgagctcaacctcgacgactttgccgacaacctccgcgagcttcggcacgtcgagaagcgctacgcgcttcacgtcatcaaggacgagattgcgatccccggccgcgaccggcgcgacgacttccggctgccgaccgactgggatgtgctgacgatgctctcgggcgagacgccgcggacgcttctgccgggcttcatcatcgctggccacgtctggcgcgtgcgcgacaaggacgtcaacgtccggctcgactcgggcgtcgaggccatggtcgacatccgctacgtcgccgaccaccacatcgactcatgcaaccaggtcgcccggattggctcggtccaggcgatgatcatcggcgtcttccccgaaaagatgctcgtcgagctctcgatgcgcaagaccgagctcgacatgggcgacgccgagcagcgccgcgtccgggccgaggagccctacgactgggagcaagccatggccgacaaagccgcgcgtgacaagaagaagcggaccgaggtcaaccggatgcggcgccagattgaccaccccaactttttcaacatgaacgccgcccaggccgagcagtacttggccacccagcagcggggcgactgcgtcatccggccgtcgtcgctcggcatcgaccatctcgccgtcacctggaaggtcgacgacggcgtgtatcagcaccttggtcggcctctccagccctctcgtcgtgccctctccctctccccatcgctgacccgcccttgccctcccccgcccgtcagatgtcaacgagctcgacaagcccaatccgcagagcgtcggccagatcctgcgcgtcgccaacaaatacacgtaccacgacctcgacgagctcatcgtctcgcacatcaaggccaccgtccgcaagattgacgagctcatgaaccacgacaagttcaagggccgctcgcaggatgagcttcgtgcgtctgcctcctcagcactcgcaccagctcccccggctgactcgccctccctccctcctttgcagactcgttcctccgaaactacacgatggcgaaccccggcaagtcgatctacggcttcggcctcaaccgcgagcggccgggctactttgacctcgctttcctctcaaagccaacgaccgagggcggcgtcatccagacctgggtgcgtgcttactgccccgccatcctttgaccacccgcccgccgatcgactgacagccgctcctcctgtctctgtcatgcagcccgtcaaggtcaacccgggatcgtacgtcctcggcgaggctgaggtcgggggcatgctcgagctctgcaactcgttcaagacgcagtacgctgagcgcctccgccagagccaggccgctgccggtgcgtctttctttcgccctctcgcagccctgtcctctcctacttgccgctgacgtccttgtcacttcgcaggcggtcgcacgccctacggccggccaggtggaagcggcgctgcggtttccggacccctccggtcaggcgcgacgccagcacggacgccgggcggtaggatgctcgaccctcggacgggcgcgacgcccaacccttacggcgcctaccagcagcagcagcagccgatggccgcgccccagcaggcgatgggcggctacgatggcgggttcgcccagcagccagcctacgcttacggcgctgccgcaggatatggccagccgggcccgtcctcggccgctgtcggctacggcgcccctccgcatcagactggctatggcgttcagcctgccggtggttatgctggcgcgcaggctggctacggagcgcctccagcaggagggtcctacggctacggccagcagcagcagcaggccggcccttcgtcgtacggccagcagcagcagatccagccgtcggcgccgccgtcatcgatggcggccatgccgggcctcaaccctcaacgggcagcgatgctcgccgccgccggtcctgaaccggctagttacgtcgctcctccgccgatggccccgtcgcctcaggccgcaggctcgggcaccaactcaggcgtcacagactctggctggggcgctcgaagcggccggccagctcagcagggtcagcagcagcggcaagggggcggctggtgagaccggcgtctttcgtttgtatcaagaatgatcttctctcgaccttgtgaaggtcgggcgactctggccaggcaggctaggcggacgacgcaagaggctcgctgcttggtcagctggctcgcgcaggcttcgactctcaagcgatgccgagcggacgaacacgccctccgaaccgccatcatccactcctacgcgccccagcctgctgcatccatggcgtcggcgatcgacctcactcacagcgacgacgacgacgacgaggttgtcatccagggcgagcggcaggtcgagccaaaagccaggaacaacgccgccgccgcagctgcgaccgccgccgcctctcgccctcaccctccaccgccgtcgtcagcttcgttcgccgcccagccgacgtcctaccgctcgtcgaacggctcaggagccttcccttcgccctcacaacagcctgcctttggcgtcccgagcttcgccttctcttacgacccttgccagccgacggcaagctcgagcaaggccgctagcctgcacgcgcccggctcggcctcgagcacgatccgcccgacgctacctccagggtacccgccgccgccacagctgccctcgacgcacagcatgccgtcccacgcagcctcttcctcctcctcggcagccttgtcgtcgagggccgtgccggcgatgccccgcgcctcgacctcgacctccgccgaggtcatcgacgtcgactcgctcccggacctccctccgccgccgccggttgcgcccaagccggcgcccccgccggagaacaagccgcacctgatcggcatgctcgagacgtcggccctgatcatgtatccggacaacccctttctccagccggtcatccctccaggccagacgctgctcgaccgcctgcccaagggcgagtttatgcagcaggacggagaggagtgggcgcgcatcaaggtcaaggtccgtccccttcatccttttgatcaaagctggggggctttcgctctcttcctacactcagggttgacactcctcccgctcccgtgtctcagtacaagccgctgccgcccggctcagcaccgggctcgccagagacgatcaacctcttgccttacggtgcgccatcatcgacgaccgatccgttcggcgtcgtcgcttcaaatgtcgccagcgtcctcggcggcttcctcgcccgcggtctcgtccgggtcgaaggcttcatccgccgctcgcgtgatgcgccttcgcggatgtgcgcttcgctcgtcctctttgtcctgacgatcccgcccaacatcaagtacgtttcggaccagctggccgagcatagcctcttcctcctcacgcccaagctgccgtacgagccgatctggtttcaaaactgcctctactacaacccgcacatttcgcaccccggcgtctacgacaactactcggcgaagaagaagtcgctcggcggagggctggccgctcaaggcgccaacgagcaacagctcgccgctcagcgggcgctcaacctccagcgtagccaggtcgacgaggtctttgagagcctcaagggcggcgacgagctcgacgagacggaccccggtgcgtccctcggccgtctcttggctcgggcgcgcacgcgcgtcctgacaggcgctgacctcacgccctcttcttcgctcagggccgctcatcggcacgacgctctacccgcatcagcgtaaggcgctctcgttcctgcgcgagcgcgaggccgaaaagcggccgccgacgggcctctccaagaagtcgtggtcgccgccggatcggccgagcctctggactgcagtcgaggagggttcgtcgagctcgagcaggaagggcaagaaggcggtcggctggcgcaacaaggtgacggaagcggtttcgtcctcgaagccaaaggagtgccggggcgctatcttggccgacgacgtgagtgccttctattcgattgccttggcagcaggcaagctgacgctcgtcccctctcttcgcagatgggccttggcaagtcgctctcggtcgtctcgctcatagcctccacgctcacgtcggcccgcaagtacgaggtcaagccgctcgaggacccgccctcgccctcggaggtttcggcccagctcgacgacggcgccaaggatttcgccggcgctatcttcaacatgccagaggcgcctgactggactagcaagacccagaagaagtcggagaagcagaagattgtcgagcgcgtggccgagacggcagcgcggcggtcgcgcgtcaaggcccggacgcgggcgacgctcattgtctgcccgctgacgaccgtcagccactgggaggatcagctcatggaccactgggacggcgccgtgaccgtcttcgcctcggccggcgggggtggcacacggcgcaacggccgggtcctcgacgggctgagcaggcgcccccgccttcttcctggacccagcagcaaccggccgcatccattccggcgccagcggcggcggcgcctgctcagcccgtcgaggacccgatcgccaaggcgctcgccgaccttcaggccaaacgtatgtcccgccagggctccttccggagcacagcctcgcgcgcttcgcgccattcgcaggtgctcgcgagtccgcgcgaaagcgtcctaagcccggcgatgcacggcggtccaagcgcgtttggcgggccgtcgccgtcgctcctcccaccgatgggcggctcgacctcgtccgccctcgccagctcgcaggccgactttgacgcccgctcgaacggaggacacggcggaacggcctcgagcaggaacgacccccgtcggcggtcggtcgactactcgcacgcgggcgagtcgatcgtcggccaccacccggcctcacggccgaactcgcccagtccgtccacagccggccgggcgccctcgccggcgctcatgcaggcacccgtcctcccgccgtcagccctcccggtcgagcaggtcctcgagaactacaaccagtcgttcccgggcgaggcgcgcgagaacaatcgcgctcggcggaacagcgcggcgagcgacgccgcgagcgcttaccgccagtcgattgccgtcccgtcgtcggcctcccaggctggccatggagaccggagcccgagccgcgaaggctttgccggcgtcggcacgagtattgcgagggcggcgagcccgagtccgtcgttcggcggccagcagggaggcttcccgaaccgggccccctcgccgagcccttcgttcggctaccagcagcagcagcaaggctacccgggccgaacgccgtcgcccaacccgtcgttctcacagcagcagcagcagcagcagcagcagcaaggaagctaccagcagtcgcttcagcagccgcccgctcgtggtgcctcccccgcgccgtcgcagatgtcacggcggtccgtcggcatcgccctcggctcgaacggcgccgtcgaccgggacgagatggccgactcgtaccggtcgtcgtcggtccctcctgcgcctgcgtcggcagcggcgctggctcctcagcagcctcctcagcaggccatgtcgcctcatcagcaccagcagccttacctgcagcagaatcagcaggcaatgtacggcgcctacgcgcctccgccgggcgcaggcgcgatgcccggcccgcagcagcagcagccgcctcaacaggcctacggcgcatacccggcagcggcctacggttacgcgccccctcctccgccgcctcagggctacccgtcgtacggtcaacctcagcagcagtacgccggctacgcgcctcctcccgcggccggatcgatggccgcgccgccaccgccgcaggctagccaggctcaagccggctcgtcccagcagggccacgccggccggtcgggctcggtcgtcagccaccacagcgcccagggctaccagcagcagcagcaggcgccgccgcctatgcaacagatgcagcagcccgctcagccgcagcagcagcagcagcagcaactgccgcctccgcagcagggtccgccgagtccacgttcgcccggcgcgtacgaccagcacacggacgccggccagcccgtcatcttctatggttcgtcgactgctccccagctcgtgcgcgccgccaatctgatgctcgagtgttctgcccttgtttgcctgctctagtcaaggcgctttacgactacacggcgactattcccgaggagtacgtttccactctgtctgctggcctatacctgccgacgctgacacgacacctcactcgcctcagattcgacttccagacgggcgacatcattgctgtcaccgcgacgcccgacgacggctggtggtcgggcgagctcctcgacgagacgcgccgtcggccgggccagaacacgttcccgagcaactttgtcaccatgtcagcgttcctttgctctcgacagcaattctccttgtgttgcgttcgctgaccgctgctcgcctgcttctgcgctgcctgccgatcgcaggttctgatgggtccgaccgccgccacaacgactttggcttcctgcccccgttttcttgatctctccttcaccgcctgcaatgcatgataccctccggctgctctcacttggtttcgcgccggtggtcgtgtgcacgttgaggcgtcggcgacgtcgggcgtcaggcgcaaaggagggagcgatcgaacctcgacgaatttcggccggcgcgcgcaggagagacggaagcttgctgctcagcccgccgcctcgcccgcacgacctcgtccaaccctgccccgctttctgccagcatcccctccctcttcccgccgctagccctcctattttctagtccagctaggaaggaattgctgcaagctgcgctcacgccagcatgctccgccactcgtgccggttgctctgctgcagccgcccggccctcggcaggccactctcactcgcgaccgccagctcgtcgacctcgtcgtcgtcgtcccgggcgtcgacgtcctcgcaccatgcgaccctgaacacccggctgccgtccgagtcgatcctcatcgacccggcacttgtcaccgacccggcgtaccgcgcgagcaggcccgacccgctgccgcagctccctcggctcaaagagctgcagcaccaggccctccaccaccaacggcagccgctcatgaacgctaagccgctcgtcccgccaaagccacaactgacggtcgacagctcctatgtcgaggagctgaggctcgagcgggaagggaagagaaagttgaagtctcgggcggtcgacgaggtcccccttcagccggtgacgacggtgctcaacgccgaccggcttgagcccgaactcgaggacgagcaggtcgacgtcctcgctcagatccgcgacggccggtcgtgcttctttaccggcgcggcagggacgggcaagtcggtcctcctccgggcgatcgtccgctcgctcgagaaggacaagaagacggtcgccgtcaccgcgacgacgggtatcgcagcgcggaacctcggcgacaaggctcggacggtccactcgtgggcatcgtgcgtcgctctccctctctcttttttcgagctcgattcggcgacgaccctgttcctggcgcatccgctgactgctcgcttcccggcgctttgccaggctcggcttcgccaccgatcctatcgggcgagcgctgcgcatcgtcagcgctggcgactcgacggcgatcgacgaaatgttcatgaacgcgcgcatacgttggcagacgaccgaggtgctcatcattgacgaaggtgcgttcgaaactcgctctttcggccgacgctccctccctcgttgcctcactgggggtcgacggctgacgcttctccgctgtcagtgtcgatgctcgacggccggatcctcgacgcgctcgacgtcatgggccgcattatccgtggggagtcgaacaaggcgaacaagaagatcccgttcggagggcttcaagtgcgttcgcccggctccagtccacgagagtctgcgttgctgatccaagctgccctctcgtaggttgtgtttgccggcgacttttatcagctgccgccggtccctgatgccgggttgaaatcgagctttgcgttcgagtcgagggcctggaagtcgatcatctcgtcgagagggcccgacatgaactgctacttcctccgcaaggtccaccggcagggcgacccgcgcttccgtgagctgctgaaccggatgcgggtcggccagtcgacacccgacgacatccagctgctgaagcagtgtcagcggccgatcaagtacgaggacggcatccaggcgatccggctgttcgcgcaccggacgagcgtcatgaagcagaacgagagctttctcaacacgctccctggcgacgtcgtcgagttaccggcgttggaccagctggaccgcaggctggtgtcggctatccgcgtcggccggaggagatggatcgacgctgataagctgcgggcgtacgccgacaagtgagtcggcccttccgcgtgcgcacgacggaccgccaagcgggagggctgacaagcgatcgcctcaaacagagaggcccggggagctgcggtgctacgactgaagatcggcgcgaccgtcatgatgctccaggtcggtcggcttgtcccttttggtctcgtctcgcaccgcccgccgtctgacccggagctgcttctcctcccgtacggcagaacgcgttcctggacaaagactacatcgtcaacggcatgcagggcgtcgtcattggatttggtaatgaggacccggagacgaaagaggcgcccttcgtgcgcgtccgctttgcctcgggtgtcgagaaggacgtccatcgcatgaccgagacggtcgagatggagggcgactcgctcctctcgatgacccggacgcagatcccgctcaagctggcacacgccatcacgatccacaagagccagggccagacgctcgaccgggtcgtcgtgcgtttgctttcctgctcccgcggctgcctttcctcatcgcagcggctgacaccgtcccttgcctgcctcgccccattccaggtcaacgccaggcactgctgggagcccggacaggtctacgtcgccctctcgcgggcgacctcgctcgacggtctcgagatcgagtttatcaacgcaaagaacccgggcctcaaggctaacccgcgcgtgctcgaattcatggccgggtccgtcctctacatcctctgtccttcatgtcgatcgcctgcttgcgccgaggctgacgacttcctttgtcttcccctctcccgttcgtttgcgtctgcagctttgcactcgacgacgtcaaggcgttgacagcttgagcgaggtcgatctcgctcacctgcccgctcgatcgcccctctatcgtccttgtcgctcccgtcctcacgccccttccgttcacgcccagcgcccaaacaggtcgcatgccccacccccacccgccctgcgcccggccggccgcgcttcctcgcagggatggtggaggagctgcagtttgacgcggtggcacgggccgtgcgggggctggtcgatgggctgcagaggggcgtagggtcgtggggtggggtggtggacgtccgttgggagacgatcgagccgacgacgacggcggccgacgccgacgccgagacgcccgccgttgctcctcctcgacggtcaaagacgtgcatcctctccttcgcccggtctttcaccgcctcccaccccaacccctcgaccgccgcccgccagccgcaaacggtccagctgcacctccttccgccctcgcggatcttcgcccgtctcccgccgccaagccagaccggcatcagcccgccacacggccctcacgcgcccgtgccgattgcggacctcgcgcatctttcggcgctgctcagcaaggtactcgatgcgtgtatcgtcaggaacgttgtcgccttcgttgatgggctcgaggtgccggcggcggcggcgccgggcggagaggcgaagacgccggccgacgagaccggcggcggcggtcgggacgggcccgagcgatcgaaacgaacgacctgctgcttcccacacgacgcgaagggtctcgccgtccttcaatggacaaagggccaaatgtgcgtcccccccccccctttcctttcccgcctcctctcctcctcaggcccttcgttctcgctcgctgactcctccttcgcttggcccgctcgtaagcctcgcacggcccgagatcgtcctctgccctccttcagcggacccgactcagcccgctcagccgacgctcaagctcgagctcgcgatccagcgcccagggcacgcgccggtcgtcggcgagtcgtatacaagtggagtaggcgcgggggacgtcgcgggatggctcgaggaaaagtggcgaaaggtcgcacgataagtcgatgggaagtcgccattggatattcggcgaggcgttgcgcggggatgggtgggcgaagtgaaagtagacgataaagaggatggatgggaggcccgacgcccagcagcaggggacgggaacatccgctggcgctagcgaccagcactggccggcagagggacgaccctagacaacgcccgtcgagcggccgcgctttcgatcaatcttcctgaagcggacgagccgctggcgctcgttgatgatgcaggccgtcgcaaggaagagggcgagcgtgatgcagacgatgccgaagatcgaccttcggcggccgtcgacggacgcgaaggggttagtcgaagacgagaagtcagggcaaggagagggacggacgaaaaggcgtttccgagagtcatgtcggtgtagagcaggacgtggtcgatgcacccctctggcaggccaagcgagctgcgctcgtcgatcccagcgcagaaggccgtcgtcgactggttgcctgcgggaaaagggacgaagaggccaggcgcggtcgcgttccagtagccgcagcagtgccactttgcgcaatccagggtgcatagcaggtcagctcaaggcggtcgacacggggcggggtcgcgtcgagaagagcggctgaccttgttttgaagcgtcgtcctccagccgtcattgaaccggacccaccgcccagcgtacgcctccctctgccgaagtgagtaaagccacacacacgtccctgcgcccgtcgcaaagagcgtgtcgacgacgagaagggcgacgaggagcctgagcggcgtctgcttcatgacgggcgatgtgacggcggggactgagaagaggaaggtgaaggcgaggaggaggccgagggcgagggcggctgcgtgtcatgccagggtgtcggtcatcagcggcccaggggaaggaggaagtagtcgaggttgacggacggaccgttgaagtgcctcggcataaagacgagcgaaatgagcacatccgtctgccgccaggcggtcgaggcgacgatgcagaggacggaggcgcctagaaggaggaggtcgaggacggcccagagggcaatgagcgtgtggagcatcggccggccggcagcacgagtgcgagttaaggtcgggacagatagtgcgaccggcgtaggctgacgggaacgaagcaaggcagctaggaacgatcggtgcgagagacgagctggaccagcagctgacgtcgaacgaggggaaagggagcgaccctgcagccgagcgaggggtgggatgttcgacaggggttcagtgacggcatgggcggactccccgacttgcgatgtacacaagggtgtttggaccagccagaaccagaggctcagaaactgagaagtgtcgacagggagcaggatgatcgtcggaaggctttggcggtccaggtcagggcggcgaggcgaggcgacgacgcgacaagaaaggggccggcggcgcgtcgccgctgcccgtgcctgcccgccttcagctcgctcgacgaggccactcttgaccgcagagcccacgagccaaagcgttcaaaggtcatgattgtcgtgaaatgcaccggccggccggccgcccatccctcggcctgcccaccgcgcctgccctcctcttccacgtcagactgggacgccttatggcgttgccttcgccgccccaccccctccgagctggggcatgatctcgccgttaatgatctccgagatggccatctcgagcgagtcgatccgggtcgacatggtcgtcactgtcgcggacgattaaggaccggcggggtcagcccgggaagggggggctatgggtgcctggcgagccaaacggccacgcgcgagaagaacgcacttcgctccctgaacaagcgagcaggtgatagtcgttcggagaggtcagtgacggcgtgcagaacgacagagcagccctcggagagcgaagacgcacaagacctcggtcgagctctcgttgaacttgtcctcgagctgcgccagcatcgtgtcgacctgcgcccgacgaacgacgaggaggtatcagctccgggtacaacgagagctccagcggctcgagcagggcgtcgaggtcaagcgagacgcacgaaggtcatgagctcggccggcgagctgacggcctggccagcgccctcgagcggcatcaggccccttaaggcggctgccgttgtcgtcgaccctcccgatgagttcttctcaccaccggcgctgtccgagccagggttgagtccagcctccgagttcttacgagagagcccgtcgggcttggggacgaccgtcagcggggctgaggatgaggtggaaggaacgccggcgtcggtcgacaacggcggcgggctggtcatctcgcgccgcgctgctggacagcagaaagctgtcgagtgattcctgggcttgaagcgagcgtgctagtggagggtctacgcttttgactgcagggctgtcgtgcgaggctggatggcaaagacgcagtgagtcgggagtcgtcgtcggagagaagcaagaaggagggcaggtcgaggaggtcgttggctctcaccgccaaacgaccattctcgccacgacctcgccatgtggcccttctcctcctcgccagcagcagcaacgacatcgacggcggcagacgcagacgacaagtgtcccgtctcggacgagacccgccgtcagtggcttgcggccgcccaggcgcgcaacgccgacggtagcagcgagcccctgccgacaggccctcatctgcctccacctcgtccgacagcgccagcagcagcaccggcagcagcgcctctggtgacgacggctccgccagtgacgccggctgccgacgcttgcccggtcgacgagaacacgcgccttaaatggctcgcctcgcagcagcaggctgcaggctcagccgccggctcaccattcgccgctgtcgcctcgacctcgcgcacgccgccagcagcagcatcggccgctgtcctctcaaccgagcgcgaggtctcgtcgatcccgcgcgtgtcgtcggcggacctgccccagctttccgagcacgccgacacggccgcattctacacgcccgaaaaggagaattgggtctacccatccgagtcgcagttctacgcggcgatggagcggaagcagcaccaacccaaagcggtcgacatgaagacgctcgtcccaatccacaacgccgtcaatgaggaggcctggcgggccgtccgcgagtgggagcgagggctcggcggtgatggttgcggcggcatcaagctaaagacgttcaaggggacgcccggcgcactgacgccaaaaagctttgtcaaccgcttcttatttgggtgcgtaccgcaggcgctcgaagtagtgagagggcaagcaggtccccttattctcgtcactgacttcccccttcgccccgccagctaccaagcgccgtttgacacgcaccgctggctcgtctcgcgctgcgggaccgaggtcgagtatatcatcgacttttacgccggcaagaatgccgactttggcttccacctcgacgtccggccggcactcggcagcttggagggctggcggacgcgctttgggccgaggccggcggctgaggcggcggaggccagacctgttccttcagcgtgagaccgatcagatgcgactcaacccgcctgtggcatccgtcacgtagtaggaagtcggaggtcataagaggtcatcgattgatcgtgcgggcggcgctttagatgcgcgccttcctctccatctggctgtgaaagttgtcggcctcgaggttgtacgactcgcggcctgcaggtcgagcggacgggtcagctccttcctccgcctccggcatatattgacggagacgcactgttgaagaagtgctcgacgtcgagcgtcgtgtcctttccgctgagaatgtcgagctggaagccgccgtgcgagaactctgagaggccgctgtcggacgagacaatctggcgctccatcagcgtccggaggggcgcgccaaggccgtaggcgttgcgggccatctggagcttgagtgcggattgcgtttggtcccactgcatgcagaggcggccggggagggggggggtgaatgccctgctctgaatctcctctgcctcgcgggtgattgccagcagatcgaaaaagaggcatgaatctccagcaacgcctgccacttctgtccccttacatgccgacccccttgacgaacatcagaccgtccaagagagcacgctcgcggaaggccttgtccttggcggtatcgacaggaccgtggattgcgaagccatgcttggcctggcacaagacgaggagacatagtcagaggagagctggcggctctttgggggcacgacgccagccacgagaagagtcaaaaggtgaggcccatgagatctacaaccgaacgggggacccaaacgcctgacagcggctcgacggtgcgcccttcgcgcgcaccgagggcctgacaagtcggccgggagcgacgatgaccgtttaggccgaagcctcacggccgcggacaaacgtgttgacaatctcggcgaacgacttgccctgggtccggccagccgccttgtcctcgtcaaggacaggaagcgtgccctttccaccagtgacggacgaggcgccgtagggcgagccgccgacaatcttctcctcgttcgagatctcgggcgcgcggtagccgagcgggacaaagttgatgcctgcaggcggaggagaaatcaggacaggccgcggcgacgaggagagaagaagacggacccatgtgcgcaaagtacggaagtgtcgtcagggcggtcgtctcctggccgccgtgctggccgccggtcgaggtgaagatgcctgcaggcggaggagaaggggttaggacagggcgcggggcggcgacgaggagggaaggagacggaccgccgaactttccgacgagcgcaccagcagcccaaaggccgccggtggcgtcaaagaaggtgctgacctgagcaggggcacggccgtaccgggttgggaagccaactgattacgaaggatagagaggggtcagtcttcagtagcaggacagaggaggaggctcgggcagggagcgcgcacagatgaagccgtcaaagtccttgaggtcgttgggcgtgatgacgggaaggtcccggagcggggcagcgtacatcttggtccggacctcctccggaagggtctccttgatctgcagagtcgagatgagattggagataagcggccgatcaaagggacacagagcaagagagaggagggattgagcgcacctggaagtgcttgacctcagcaccggtcgaggcaacgccctcgacgacagcctgggcgagggtgtcgatgtgaccccaggtggtgtaggtgatgacggcgatcttggcgggcatgttggctgaggaaggggcccagaaagacaggcgatggtcagatcgtgcacgcggtgagacagccggtcaagcccggatgctgatggagagtgcgaacgcgaggagctgagcgaggcgcgggaggagaagcgagcgagcgagcggagcatcagggcgtgggtggatggaagcgagaagagagaacgccaggtaggcaaggccaagctctttaatagagctgacgggcgcccttgagcgagagctgacgtcctctttgctcgaagctgagctcggaccagcccgaggaggggagagcacgcgcgcaatggggaaggcagggggccagagacggatggaaggacaagaaggcaggacgcacacactgttgcggatagagaggacgagtgcgatgctgtgagagggagagatctggttgagggagagagggcaggatgagctcagccccctcggcccggctttgaggcacgtcgccttcgatcgctcttcggcttgggaccaagggacggcgatgggactcgacagtcagcagcgaccccgttttgtcaaaccacacccgtcccacgccgccggagggaccacggagggaggccgacagcagaaacaaaggcgtcacgtaacgaggccctcagagtcccaggcgagacgccaggatatggacaggtcggtcagccggaggagccgtcaagtcaagcctggcgtcagccgtcgttgcgtctcggcccggacgagactggcgcgggcagggggcgttgtgtcagcctaggtcgttcgctagagtacgccccgctcgacaaaggatggggtgctgcaggcggtagcggtactgttgatcttctcgataagcatgagttggctagccggctgtgggcaggtcgcgagagggagcgaggcggaggccgcccacccctgctgctgctagccggccggtgacgcgggcagctgcgcctgctggcgaccttgcttcgatctctctcctctggccctcccaaccaccatccatccttctattcctccgacgtcccaaccttttacactcttgtccgtctaatcccggctgctactgctgctgctggatgccaaccacctcgatcctgacagctccctccccctcagacagccgcgccaatgtccgacgcctctggaaccgccccgatcaagtcgtgctgtgtctcgggccaccttcacgagggtacgcccgagggcagccagcagacactccacggcctcccaacctacgtcgtcgagcccaaggccggtgtcgagctccagtcgggcacgaccgtcgtcttcctgaccgacatctttggattcgagctcaccaacacgcggctactcgccgacgagtgcgtgccctgggtcgagccggatccgatccttgcggccaggctgctgacctttacctctctactcgcagatgggctgccaagggctaccgcgtcctcatccccgacatcctctcgggcgaccccatctcgcacgacctgctcgttcgtccccagcgcccgatttagcacccgcccggcgtcttttgggctaaccctcctcgtcccatggcacacggctcttgcagaacgtcatcgtgcccaacctccgcgagcaggagcgcaaatcggccgttgagaaggcgtgcgtcctgtccttgctctgtctaaccttctcgcacgcttcttacaccgtcgtctgcgcccgcatcagagccgacacggtcaagatgggcgcggctttcggcccctgggcgctcaggcaccgtgacgctggttggtcgactccatctgctgctgtttcactgccgtagcgtagctcacctttagtcttcacccatccgtagtgaccctcccgatctggcaggacttcttcaaggctgtccgagccgaaccagaggtcaagacgctcgtcgccgtcggtttctgctttggcggccggcatgcgatccttgccgcctcgggcgagtcgccactcgctgacgccgccgtcgccctccacccggtacgtcgccatggcccgtgcgagagcttcaggcgggcatgctcgactgacctgctgcatctgctctagacgggcctcgcgatcccggccgagctcgatgccgtcacccggccggccttcatcggcgtcggcgacaaggatgcgatgatgtcggtcgaccaggccgaggaggcgagcaagatcttcgccggccttcgtgacaagctcgccggccgcaagtttgaggtcaagatctacccgaacgtacgtcaccgtcgccttgagcaggctgtcgactggaagtgctaaaggctgacgccgacacctcgaccgggaacactgacaggccgtccacggcttctctgtccggggcgacatgaccgacgccgaggagcgcaagctcaaggagtcggtcaacgaggacgccctcgccttcctcgagagcgccctctgaggacacaccattcttgtatcgcttattcgttgacccgacatggatcgtatgtctccatcctctttgatcgggcttgatgataccgaccgaacatcctcccattcctgcccccttcttcttccttcgccatcgtctccgccttcgcaagcctagcgaggtcgcgtcagacaaaaaaaaagcaaattgcgtcgatcgatatttacgctcgccctctctcctcgcctctcggagtcggctctcgtacccaaccccgaatgctcgtgtcctcctcgtctctctcctctccttccctcctgccgacctcgccctcagccgctaacaaggagggggggggaggatacttaggcaaacgtcgtccagtaagcctggtagccctttggctttgcgctctcgggcaggccggcaaagtagtcctggtcggtcgagtggtacttgtggttcgtcaggttgaaccaggggaagagccctaccgatcaacgatcacacacgagggaggagtcagcgaccgcgcacggtgaaaagggaagggaggaagaggggggggggaagggaagaggacggacagagcatgtcggcgctccgcgcagactgcttcatcgcgacgccctgcgtataatcggacaggcgcgtgtcgccatagagcgccttgccggcggcgatgcgctgccgcatctcggcaaagtcctttgcgacctcgcgagcgttttcagactcgccccagaagcggtctgcgagaaagaaagtggcgagggggggggtcagttgagggaagaaaagggcgaggggcgcgcctgtagagcggcggctgaggcaaacgatggggcgtcatctccaaccgagcgtcgaacaggacggatcccgaggggggacgccgcccccgtttgacccggtttacccgcgaacctccttctccgctcagagcctgagctgagaacgtagggcgagaggcgagagccattgtctctcccgcctcctaccttattcgcgtccctaggatcttccctcggcggctcctcttgtccccagcgccaagccgaccgatctcacccctccctgttcgcgcgcaccccagccggcaagaagagagacccaggacgacagtctaggaggaaatggagaggaaggggggacgtacgcgacacctgctggtagcgccacaggaagaggccgatcgcgccgtagacggcacactggacacgctggacggcccactcgcggcgcttgagccggagggggaaggcgtagtctgcgcgcgggcgggtgaagcggaggaaaggggggttagcgcgtgcgtacgtgcggtattggggaagagggcggaagcagcaggggcgtccgacgtcgtcctccggcgcttgacgtcggcctgctccggcctgccctcgccatcctcttcgacgccgacctcgcccctgttcctcccttcccaagtccttgccccctccacctcaacctcatctccgacagccgcccgcagctgcccgagcaacacctcaatcttcccaaacgtctccgggtccataatcttgcggacgggctgatcaagctccagatcgcggtacgtatcgcgcacgacgccctcgacgttcgtcagctgccctttgcccggcgggatcgtcagggcaaactcggggatcgtgacggttgcggtgggggacttgacgagctgacgggagaggtcggcgggggaacgaatgtggatcgtgtaggtcgagccgcgctctgttcaggcggacgcaagcgggcgagggcgcgagcaggcgagtacaagcgggagcaaggcaaagggggagggatgagccagttgcgcgagaggtgacggcaagcctacgaagaggaatgaagcggcgcaccctgaatcatgcccgcgctctgaatctcggtgtttgcctcgccacagtgctcgcaccggaacgacatgacgacgacctcgcgaaagtaggggatgctcgtcagcagcaggcgggtcatgccctgccgacgaggggtacgcgcgcgtgcaagagagccgtcagccatgtcgttcgaagcaggttggaaagggtaggggcgcggaggaccgacgttctcgtgacacttcatgcagaggctctcgatctcctggacggcccgctcgtcgtcctcggcgtcgtcggccatggtcgagtcgtcattcggccggtcgccctcagcgacggcgatcgagccaatggaggggaagaagctgcaagtgagagggtcatatgcgcgtcagtagctgcatgctgtcgacactcgaaaggtggacagacgggtcggcggcttgaggcatggcaggcgagggtgttggtggtggtgaaggagagagcagcgagggctcgtcagcagcgcagcttgaaagcgcggctcgatcgcattcggaggcagaatctcgcgcgcactggacgacgtcggcagctctgcccgcctacgctctccctctcactccataaccttctcgcccgccatgcccaaggagctcgtccgcaagcgtggaaagcgcaagcccaaatcagacccggccgtcgtcctccccgccaccgccaccgccgccgttgccgcctcgacctcaacagcagcaggcaccgcagcgctcctcggcccgccgtcagacggccgcgacgccggctacggccagcgtgccgcgctccacgccgcacaagagcacgcagcctacggcgccggcgggaccgagggtcaggagcagcagccgagctgggtgacgccggctgatggtgggctggggagtattcgtgagagagtcgagggcgatgcgccctgggggtttgtcgaccccgaggtacgtcctgcgttcgccgtcctcggctcgtctcagcttcagcgttttcaagagcgtcggaggctgaccaacaggcttggtcggttgatatgtgctcaggtcaaggcgtatttccggaccgtcgacgagaagctcaaggctttcgaggcggctggtttgcccgagggcgagacggccgaagaggagaatgaaggtccgtccctaccctcactcgctctctctcccacccgcaagctgacacctagaaccccacctgctcgcccgcccgtgcagaccgccagctgctcctcacggccgcgctgagcgagctccgaggcaaggagctccagctcgcgaccgacggagactgcgcgctcatcctcgagcgcatgtgctggaacatgggcgactggggccggcgcgtgtttgcagactcgctcgcgggaaagtcagcaatctctcctctttgctcgcccgctggccggccgcagcgtcgatgctcgcgggctgctctccgaagcgcgcgaaaggctgatgctcccctcccctgccgactcgccagcttcgagaagctcatccagcatcgcttcggctcgcacgtcgtccagacactactgacgcttggcgcaaagacgattgaccgcgaggtgcgtcgcgcgcgccgtcgatggcccggtcaccgccgctcctctaacctagttgacccttcctgctccctgcccttgccccgctttgaaggagcgcggccgattcccgccccagcaagcccgggcgctcgcctccgccgacgccggcgtcctcccgctcttctctgcccaagtgcatgagctggtcgccgagctcctgccggcccttccgctcctcctccagtcgcccttctcgtcccacccgatccgcgtcctactcctgctcctcgctggacggccgatcccttctgcctccgaccagggcgcatcggccgtccgctcaaagaggagcgaaaagtacgcccagcagaatgcaaacttcaagccggtcgtcgagaacgcgggcgagacgactacagacgagctcgcggcaagcctccgcgtcccgcagattctccgggccgagctccctaggttctggcggacggtccgggccgaggtctcgccggtcgagatccgcgcgctgggtgtcgggaatgtttcggggccggtgcttcagatgctgatcgagctggaggcggagggcggcgaggccgacgaggaccggtcgatcctcgactcgtgcctctgcgggctcgtcgcttcttcgcgcgctgcttccactggggagggcgagcaaccctcggcgggcgagcgcgaagactacgtcgagcacctcctgcgcgaccaagcgggctcacacctgctcgaggcgatcctcctccactcgcccgcgcgcatctttgcccgcgtctggtcgacctacttcacaggccggctcggcaagctcgccgtccaccccgtcgggaattacgtcgtcgcgaagggcgtgaggcggcttgacggcgcgcagctcgggaagatggtggaggagagtgcggattgggggcgggcggtcaagcgctccaggctgggcgtcatctcggctgtcgttaatcgctcggcagagctcggtgtccatggccaggcggtcctcactgtgcgtccccggcgctgtaccgacgcgtacgactgccccctcgtctgatggactgacgacgacggcttgctctcttttccggcctggcgcaggctgtctgcacggcgtttgagatcaagggcaaggagcaggagggctatctcgtgccctgcctgctttccctcaagccgcgccgcgtacgtccctcgcctccttcgcttccctcccggccgcaccgacctgacctgcccgcccgctccccttcagcgctaccggaaagcggccggcctgcccgccgaggaaggtgacgacgccgggtccgatgacgagttccccgcgatcgagccggtcgccgacttcctcgcgccgtcgctcgacggcgcccagccgacggccgacgacctgaaccggcttaagcgcaagctcgggcatcagcgcaaagtcgaggaggagcgtgagccgctcgcgccgaccgttcagggctgcctgctcgcgcaggcactgctgaagctcgggccggacgaggccgaggtcgttgtcaactcgtgcgtcgttccctacaccctcctcccagctcaccgccgactgacgccctcccctctcccctcccttttcaggctgctcgcacagaacatggacgacctcctcgcgatcgcccattcgcccatcgcctcgcgcctcattgacgccatcctctcgacccccgaggtcccgttcaagctcgcccggcgcgtcatcctcggcttcagcgagtcgatcttcgccctcgtcgacgaccggctcggctcgcgcgtcggcgaaaacatctgggcaaagtgcgatggcttcctcaaggtccgaatgcgtcgtcatccgctctttctctctctcttcctctctctgaccgcagcaactgaccacccccgcccccctcctctctgcgcgacgctcgcaaacaggagaagattgcaaagtcgctcgcgccctttgagattgccctcgccgaatcgcagtatggccgcttctttggcaggaagctcaacctcaacttctacaagcgcaagccgcaggagtggcggagggcacagacgacggcgccggcggctgagggtgcgggagcggggagggaagctggacagccggcgaaggtgacgacgcctactgcaacggcgactctactgccggcgtcgtcgtcgaccgagagcgcgccgccgccgccggccgagaagaagcgcaagcggccatcgacaatgacgacggcggcaaagaccgaggccgatgacgagctcgacgccatctttgcttcggcccctcctcctcccgtaactgccagcggcgacggcggctcggccgagcagcccgacgacaaggacgggcggaaagcggccaagcgagcgaagaaggctgctgttaaggcgggcaaggctgaggtcgagggagacgaggggctgaacagcgtgctcggggcgatccgggaaagcgctgccggcggcggtggtgcgggggaggtggctggtgctgaggagaaggcggagcggaagcggaggaagaaggaggcgaagcgggcggccgagaaggcttaggagggctctgatgcgatgtctcgagtaccctctctctcttccgtttcgcctcggaggaccggtcggtcggataggggatggttcagtgagagaggagaacaagagccaagcgaacgcacgccgtaactcttctgaaacgtccatcgctcgggcaagggcaacgagagagggcgctttttttcatacaatctcaaacggctccttgtcggcttgactgacgaggaactgccagcctccgccagcttcgtttgcaaattccgcctcgagccgcggctggaggacctttgcgaggtagggccgctcggtgttggagtggccactggggcgtggggggagggaaggaaggacgacgtctcttgtcgactggtgcatctctcgtcgtttcatggagtcagcaagcggcgatcgtctcgcgtcgagtgacaactgattttgcgaggacccccccttccaagcagccccttcggtcatgtgccctcccgctgtggcctcgcattgcccgtcagctgcccctctccctcgtgcgagggcgtcgtcgcgctgcgatgctagtgctgctcatgctgctgcgggcggtcgctgccagaagcgagggtcacgcgcgccgctttgttgcggtgctcgacccgtccgccacccgttgcccggcctcgccatctctcgagcctacaaaaggctggcggccggtcgcctcctctctcttgcccctcatcctctctggccttttggcttagatcatgtgtagtatctgttcttataaagttaaaactttatagccctcccatcgggagggctcgttgttttactctctttttgccctcccgtgttcttctcgctcctctgcttgcacgagcggggcacaagatgaccccggcactgcactcttgccttgcgtcgtcagggaccccctctcctccatgctactcctcgttctgcgcgtctcctcgttgaggggccgcaggacctggacatggactcggtctcctttctctgctcgctttcttgatgccgtcgcacgacgcccactcggtcggtgaagacagccagcgcgcctcgtggttgtcgcccgccagcctgccatcgcaagccgccaccgcaggggtcgcgtcgcttggaagatcagtcgcgtccgctcgctttcgcggcaggctcgcacgacggtcagccacgcctcgctcttctctccgccttctcctctccctctgcacggccgacttcacgagcgaccggccgacctgaccgcctgcctgacctttcatcgtctcgctttgggccggatgcagattcatccgaagagcccccagaagtccttccactcgcctccatcgcgtcgcagctcaacacgctccgggacgtcaccgacgccgccaaaaaagccctgcgctcgccactggaggatcgacggcttggggaagggacctggcgacggaagcgagtgcgcgtcagtcctcgcagggcggtcgagctgcgcgatcatgatgagccctcgacgcaccaaagacctcgcgctcgatcgggcgctcgccctctggcagcgacttgatgtactccatcttgaagcggtactcgtacgaagagccgtcgtcgggcggtggtggctgcgatccggcgccggccgacggcacctcggctggcgggccgctcggccttggcggcgcaggcagcagccgctggagagcctcgcgcgacatgctgtaaatgtcgagctggccgagcgccgtcagatccgacgtcagggccgagaggcggtcaaaggccgaaggtgccgccgtcgtggacgacgaggaggcggtcgggccggcagaggcggcagcggccgatgtcgaggccgtcgacgacccatccgcatccatgtcgacatcggccgggggtgcggccgctttgcctgcagctttggcgagccacttcttctccttgagacgctcggcccaagacttcttgggaccgccgccagcctggccgccgaggcgctgcatcgcctgcatgacggtctcgccccggtcgaggaggccgacgagctcggcgaccttgccctcgcggccagaaccaccttgaaggtcctcgacctcctgccgggcccgctctgcctccttgtcctcctgccgcttcttggcctcgcgcgccttgcgcatcgccgccttgccggtgtcgacgccctggagccacgagtcgtggacttccatagcgtccttgcccttggcgacgtaagcgccgtcctcggtgaacttgccgtcctcgagctcgtccttcatgttgaacgacgagagctcgtggcccattggcccatcgagcccgctcgccggctttggctcgtcgtcgtcgtcgtcgtccgacccgccggcgccgaactcctggccctcgatgtcaccgagcgcgaggaacttctcctgcttcttcttgccggcgccggcctccgccgtggccttggtcttcttgtcggcgtcgtcggcaaacatatcgtcgtccgagtcgtcgtcgccgtccttggccccgggcttgcgcgagaggacgacgccctcgccatcgtcggatgagtcgctgtcatagccggcagtgttgaccgcgttgcgcgtcgtctgagagagcggccagtcaacgatacagagaggtgtcagtgtgataccctttcgtcggacggtaagcagcccaggaggacgcaccttgacctcctcgaggtcatcttcgtcatagccctggccgccagcgccgacgctgctggtaccgagatcctcaacccgggcgcgctttgatgggccagcggacgccgaggcgggcgcgtccttgcgagaaggcatgttagagagctcctgggcggcttgagagagagagggagctggagaggaggacgagatgagggtcagcggggaagggctcaaggcggctcagctgtcgactgcaactcgactgctgccgccattataatcgatctcagtcgaatcttgatcctgatcaagatgcgccggccgagcgcgaaggccaagcaagggcgggcgacgacgacggtcactcctgaccccctacccaccaccgccctactccctcccctttcctcgcagctcttagaggccatgtcgactcccgccccgccgccggcaaagtcgccgaccgaccaggacttctcgcaggccgcgagctcgtcgtcgagcccggtgagtggcccaggcgacactgtcacgcgtcccggctcgcctgccggatgacctctctgctccttcgaagccgtgtcaagccccggattgcatgtcgctgatcttgatgccatctcctcctcgtcagctgaagaagttcaagctcgtcttcctcggcgagcagagcgttggcaaggtacgtttctccgcggtcgtgctccttgcgggccacacccatcgcacgccgccgcaccccagctcgcctctgcccctcatgactagcggctgacgctcactgccctgtcgccgactatacactctcagacgtctctgatcacgcggtttgtgcgtctgctttggctttgagactggtcaaatcaggacccctggcgacgctgaccggtgaatcgcgtcgccgctcctctctcctgagacagatgtacgacacctttgattcgagctatcaggcgacgatcggtatcgacttcttgtccaagacgatgtacctcgaggatcggaccgttcggctccagctctgggacacggccggccaggttcgtctttcgctgcgtccgccggcagctcgaggcgggctgcgcaaggtgcccgagcactgctgacgcccctgcacgcctttccacttcatcaggagcgcttccggagcttgattccgtcgtacattcgcgactcgagcgttgccgtcgtcgtctacgacatctcgagtgcgtcttgtcgctcggtctggagaacctctgctgctcctctcggctgacctccggcctccgtttgccctcatttagaccgggcgagcttcctcaacacgaccaagtgggtcgacgatgtgcgcaacgagcgcggaaacgaggtcatcatcgtccttgtcggtaacaagacggacctgaacgacaagaggtgcgttgttgcccaggggagcaacagccgcgccgccgcacgcctctgccgcacgcgtctgacagcctccctctcgactctggtaggcaagtgacgccggaggagctcgaccagaaggccaagtcgctcgacgtcctctcgatagaaacctctgccaaggccgggcacaacgtcaagagcctgttcaagaagattgcgctcgcgctgcctggcggaccggaggcggccgctcctgcagcagccgagaccaacgcgagtgcgtgctacggcctctatggtcatcgccgcggactgcttctgacgacgtcacttgcccaccccttgcagagatcgacgtcggcgccgctgcgaaggaggaggcggcagaggagagcggcggctgcgcatgctgaggccgcttctcgaccgccttcgcagagactctggcccagacgccagaccagcgaccgacttttgacgcttgacgctattcgccggccaggccgacgcccttcttcacccaccacaccagcacgctcggctcatcgtcgccgcattgctagcatctcgactctcactcacacacacacgttccagccggcccccttgcggccgcatctataccctctgctctcgccctgccttgctgtacctgcgcatgatcgtttcgcctctttcactgagtcgtgaaggaagccgtttgtgcacaagccgcggggaggcatgccgcgggcgcgagcagacgaggcgccaccctcgcggcggggcgtcgacctcgccgcaacctccatcttccgccgctcttttgtgcctcgcctcagcctctcttctccctccttgccaccgtacagccggcaatctaacggacagccaagcgcacagtcctgatcaacatcgctcgccgccagctcgcagaccctatccgtacgtcggccatcgccaaaatcctgcgggcggaagaccccgcgcgcatctcgctcgaccgtctctctcgcccgccagcctcctcttgttccgcgtcgtcgacagcctggatctgacctttacttcggcacggacgctctgcttgctccatccagccgtctcccgaccgtccggcgaccattccgctccgacacgatggacgtgagtttgcttgccggcgccctttggccgaagctcgacctggctcgacggtcgctacccaccctggccggcactgacccttgcctcccttctctctcttctcgcaggccgtccttgactttacgcaggatcttgacattgacctgctcgaccgtgtcgtcaatgccttctacgctggcccgccgcaggtcacgcgtcgcacgagtgtttgggcttggccgccggagggtcgagcctgcagacggacgtacagcattcaagtagactcttctctgcttcaggccgacgtctgctcgacagatactgaggtcgcaagcgcaaggcctgctttgagagccaaaggaggcgagcccggccgcggtgctctcccgtctgccgacttttgcgcagaacccacggccagcccatttgcttgtgcagagctgtgccttgaagacatcacgctcggttcggaaggaagaatgttcagcacaaggtggcgccgccgcatgggcgacgtgcgatcgagtcggtcggccgccagcccgcggttgaggccgtctgactcagtctccagacaagcaggagataccatcagaggtcagagctggtcagcaactcggcgcggcagtcgtgcaggttgagcgacgtggagcgagcgagcgagtggagaggcggtctcccgggaggcgagtcgggtcgaaggcgtacgctcgctgtcagcccagcccgtcgaggacgagcctgatccgagagggagagcacgtcgcgagttggccagtccgagatcgggttcggcttcgcgatgcggagcgagcgtcgttgcgcatgtcaaacagcgactggacgagcgagccgatgacagcttgctgcgggaagcggtggacagggcggtaacttgtcgcgctcagagtcagcaccgccgccgttggccaagggagggcagccgaccagccggcgcatcgggccataaaaagatcaaggcatcagtcatgttgctgccgtgatggcgtaagatatcgacgtcggcagtcgatggtcgggcgttgacgggcgagaccggagaggtcgagcggtgagtgtctcgtgacggaggagcggtcataagcaggtcctgcagacgatgaggcgggcctgtcaccaccaggccggtcgaacggtcgtccgactgacgagaaatgagcagacagcgacagtgaccgttgagggtaaaaggatgccagggctggacgacaggtcggccaggtcgcaggactgttgcgcgcgggcgcgcagccgactctgcgtccttcgctctgatccgcctgtccgaccgactaagaaaggttttcagtctttacccttctgctgattcctttccgagtggaccgagttacggtcgctcaaattcaactagggcgtcttctaattcatctcgacgtcctcgcctcctccgaccttggccgactttgccgcgctcatcgccacctcgcgctcgtcgacacccccgtcggtgcctttagcaaagacgtcgatcccggccgtcagagagccgatgaggagctcgaggcgggaggccgtcaaagaggactcctgcacagggagaaagggcaaagggggtcagcgggtgggtaggcgagtgtgcgggacgtagagacggtactggataagaagcgaaggatgatgaagacagagtcgcaaacgaatgccgagtcggctactcctttgggggtttcttcgggccgtgctgaacggcgctgtgcgtctggcaaggcagacgactctgagtcctcctgccgcaacggccctacctggccaccctttcagccgcgaaaagcgacttgtcgcccgcctgcatacgcgcgtctctcccgcgaaagagggtggagaaagggatgcgaagaagcgcgacgcacctgcctgacggcatcgaggtcgtccccgaagccctcgagcaccttccccatccagaactcgcggaagcgccgctcggcactcggctgctcctcgcccttgccattgacgccggtggcggccgccgacgctgctgacccggagatgggagcggcagcgggcatgaacgacggcggggcggaccaggcgggaattgagggaggaggaggcgagggcgagctcgtctctcgcgcaagcctgcgcgacgcgaccgtcgaggacgaggcggcgacagcggcagcgccacttgagccgccgacggcgctggaagttgcggtcggtttccgagcggccggtcggtcgtcgtcggatgagctctcgtcggacgaggacgaagcggcgctactgctgctttcgctgctgctgctgctacggctgctgtcctcgtcctcgtccgacgcccgacccttgcctttcttcgcggcgcccgcgtcctggcccagagcagccgcgcgtttcgcagcgagcgcaggaacgagcggtgcctcctcgtcggacgagctcgacgagccgtcggacgacgacgacgacgacgacgagtcggactgctgacgctgggcgcgccggcgcttgcgggcgggcttcttggtcggtcgaggtgggccggcggcgggcatggtcgagtggtcgggcgggcgagcgagcgaacgggtcgggttggagtgctggtagacgacggagagtagaggcgtgcaagctacttgctgggtcctggcgaagagtatgggtcgaaggtcggtgctgtcgacaggctgcacgtcgactttcgggcgcggcgaggaaatgcagatgcgagtcgcaagccaggccgttttcgaccgtccgacggcccgactcgacgacgggtcgatagctgacctctacaacctatcccacactctcctcgaccatgtctactgctgtcgagtaccccatcatcctccctgccccgcctgccggctggtcgacgacttcggccggcgcccagggcaaactatcgtcgcccgtcaagcacacgatcttccctgccgggccttcgttcatccgcgagaccgtccgggccaaccttcagcggtcgtttgccgaggacgacgccatctgggacgctcaccaccagtcgctcaagcagggcgagaccgaggagctcggcccagagtttgacggcctcggcgaggagaaggagtcggccgagattcttaacctcgacccgaaggagtggaagaagcaggaccactacgccgtcctcggcctgtcgcacctccgctacaaggccaacgacgagcacatcaaggttgcccaccggcgcaaggtcctccgccaccacccggacaagaaggccggctcgggcgactcgaataacgactcgttcttcaagtgcatccagaagggtaagtcgagcctccttctcatggctcgtcgcgccttgggctgatagcttccttcctctcgtgtgacagctcacgagtcgctcacctcgctcgaccgtcgtcgccagttcgactcggtcgactgggagatcgaggacgccatcccggacccggccaaggtcgccccggcgaaatatgtctcgacctttgctcccatctttgcgcgcgagggccgcttctcgaagcgccagccggtccccgccttcggcaccgactcgagctcaaagcaggaggtcgagggcttctacgacttctggtacaagtttgactcgtggcggtctttcgagtggtgggacaaggaggccaacgagggctccgactcgtgcgtcttctgtgcaagctttgggtccccccaaacttcttcgactgacgcgccgcgtcaccttcccttcgtcttgcagccgcgacgagaagcgatacgccgagaaaaaaaacaagtctgagcgtgcgcgccgcaagcaggaggacaacgtccgcgtccgtgagctcgtcgacaccgtcctcgctaacgacccgcgcatcaagcggatccgggccgaggagaaggctgcgcgtgacgcaaagaagaacaaggcggccggcggcggcaagcctgtgctgagcgccaaggagatgaaggaggcggaggagaaggccgcggccgagaagaagattgcggacgaggctgccaagaagcaggaggtcgaggacaaggtgcgcactcgtcacacgctggcgttgctgggctcggtccatcgaaactgaccctgtgctgctcgctcgtcctctaggtcgcccgcgaggccaacaagaaggccaaggaggctgccaagaagaacctcaagaagttcaagaaggccctctcgaccgtcctctcgtcgccggcggtcaactactttgccgcaaagggctcctctgcgcctgccgcacagattgaggctgttctcggcgagctcgacacactcgcggccgctgccgaacccgaggacgtcaaggcgctgaaggagcaggtcgaggccgccggcgaggaccaggccaaggtcaaggccgtctttgccactgcggccggcaagctcgtcgccgacggcaaggttgaggaggccaagtttgctcagttcaagtaggcgacgactgttcgtctgacgtgctgcctacatatgcccatgcgcgctctctccatctggacgaaggggatggcggcggcagaaagtgacggctgggtctcgccgaacgctttgcttgctcgccagttggcgaggctgctcgagttcctacttctagccggcgaaaaaaacttttaacgcgaggaagggcgctcacttgcttggccggcttcacgcgttctgcgtccgctgtattaatgctttctctctcgggtcgtgcgccgagaggcgtgttcagccacggcacagtgtccgaaagccttgaccatcaacagaccggcatgacagctagcctcgctggtcgatcagctcgcagcgctcactggcgcgaaaccctcgcagatgcgaaattatcttcgaccatcggatgtcggccagcgggcagaggaaaagggtcgtgctgatggaacgtctcgttgtggctgctgagagagagcccaaacagtcgtgcgacgcgcctcccggcacccccctcctcggccggattcacgccatctacccgctccacctcgtcctcgccctcccgtcgcagctctacgcccacgtcccgctcacgtcgctctctcccgcgctcactgcccgtctctccgcggctgcttcctcttcctcttcttcctcccacggcggcgaggaggaggacgaagagaaggaggacgacgtcccgcctctctcgtccctctttcaaatcgggtcgtggcacccgaccgtcgtaacgcgcctctacgccccaggcgagtcttccccgcccgcgctcgagggctggaagccgcgcgatgcgggcgagagggagtgtcggcgggtcgagtgctcgttggagcccggcgcggtcaatggcgaggttggaaggggcgacgtcgaggccggtttcgtgagttcttcccctttgtcactcccctttgcgtttcttcttggctgctcttgtcctcctctgcccccctctcccccacccttcttgcttgcctcttcactggccttcgcctccccgctctccgtcccgtttccctcctccttctttcacctcgtcccgctctcctcgtccagccgcttggtcatcctccgctaacacccccctcctctcgcaggccctcaccggcgccgtccagtccatcgaagaccacggctacgtccttgacctcggcctctcctcctccttcaccggcttcctcgactttgccgacgtcgaggctcaccttcccgcacttgccgggaggaagtttgaggtcgggcagctggtgaagacgacggtactggaggtgccggagcatgggcgcaactgccagttgacggtcaaccagagcgcgatcaagaatgcttgcgtgcgtcctcccctccctccctcttgcaaccttgcttgcacgctgtcgctcacgagtttgttctgaccctccccccccccttcctgcgccacggccgtccgcctcgcagctctcgtccatctcgaccatctcgtcgatcctccccggcgcgctcgtctcggccctcatcaccgccgtcgtcccccagcgggggctgaacctctcactcctcggcttcttcaccggcaccgtcgacctcttccacctaccgctcgcaaacaacagcctcgacaagttcaaggttggccagaaggtgagggcgagggtgctgtacaagacgacgaacgcggccgaccaggaggtccgcttcgggctctcgctcaaggaggacgttgtcgggctcgtcggcggcgaggagagcgtgctcgccaagttcgaggtcgggcagacgatcgagagcgtgcgggtcgttcgggtcgaggccgaatgggggcttgtcgtctcgatcggctcgtcgtccaagaccagcccgcaaggctttgtccacatctcgcaagtctccgacacgcacacgccaaccctctcgccgacctcgggcccctttgcgccagggacggcgcacaaggcgcgcgtcgtcggcgtctcgctcgttgacgggctcgtcaacctctcgctcaagccttccgtccttgaccagacgttcctcaaggtcgccgacgtccagattggtacgatcctcaaggggaacgtcaagcggctcacgcccaaggcgctctttatcgacgttggaggaaacgtcgatggcgttgcctggccacttcattgggccgacatcgtcctcaagaaggcagaacggcggttcaagattggttcggccgtcaagtgccgcgtgctcgccgtcgagccagacaagaaccgggtcgcactcacgctcaagaagacgctcgtcgagtctgagctggccgtcgtgggcgactgggaagcctgcgtgccgggcgttgtgaccgacggcgtcatctcaaaggtgctcgagcggggcgcgatcgtcgacctctacggcggcctcagggcgttcgtccccgtcgccgaggcgagcgacagtttcgtccagaaccttgccgaggtcgcccatgtcggcaagccggtcaaggtaaagattctttcggtcgacccagcacagcgcaagatcggggcgtcgatccggcaagcgaaccagcccgagggcgccgtcgacgacgacgacgagccctcgtcggcctcggcctcgaagacggtcgtacccgatgcgtctgcgcttgcggccgtcgagatcggcaacgtcgtctctggcacggttgccgccctccatccgagccacatcctcctctcgctcgtcccctcaggcgccaaagcgctcctctcggtcgccaacctcgctaacagccggtccatcacgcccgaggcggctaagagcgccatcaagctcggagagacgctcgaggcgctcgtcgtcgttgcgaaggacgagggtaaggcgctcgcgttcgtctcgttcaagccgaaaggcaaggccgacaagcaggctggcgggaagaaggagaagcttgcgctcgaagcccttgactacgactcgctccctgtcggcgaggttcttcccggccgggtcctctcctcgagcgctcatcagggctcgctcgtcctcgtcggcaagtcgctcaagggccggctgaacccgaccgacctcgcagacgacttcagccaagcccgtgcgccactcgaggtcggaaaggtcgtccgtgtcgccgtcgtccgtgttgacaaatccgcgcagcaggtcgacctctctctccgtccctcgcggaccgacccggccaccaagggcaaggtcgtcgatcgtgagattggctcgatcgacgagctcgagcagggccagaccgtcaggggtttcgtcaagaacatcaccgacggcggcatctacgtcacgctcagccgcgacgttacggcccgggtcatgatccgcaacctgtttgacgaggtctgtccctctcgcgcccgctttactctcgttgcccacccacccggccgcccgctgacgaccttctccccgctctgcagttcgtcaaggactggaagccgcgctttgagctcggccaggtcgtcgagggcaaagtgctcgaaatcaacccgatgcgcaaccaggttgagctcacgctcaagaagtctgttgacgttgcgcccgcttccaaggcgaagggatacggcgactttgtcgagggtcagaaggttgacgtcgtcgtcaaggaggtccgcgagtacggcatgttcctccggatcgccgacagcgtcatctctggcctctgccacaagagcgagatctcggacgagacgaagggcgacgtcggaaaggcgctcaaaggcttccgcgccggcgatcagctcaaggcggtcattgtcacgcttgatccggccgcacggaaaattgcgttctcgatcaagccgagccattttgccgacgaggactttgcggcaagcgaggacgatgaggaggctagcgacgacgacgacgacgaggagcttcaggacaagatcctgaagatgattggcgcagaggagtcggacgacgacgacgacgagatggaggaggaggatgaggcgtcggccgctgacgaggaggacgacgatgacgtgagtgcgatctgatgcgcccatcgcccttctctcctttcgaccgactgcgtgcgaggggctgacctggctctcgcctgcccgctcttcaggtcatcatgctcgaagacgacgacgacgcggacgagacgcccgctgccgtgccggtcaaaaaggccaagacggcagcgaaggctccggcctcggcggctcccgccctcagcctttcgggcggcttcaactggaacgcgaccggctcggatgacgagctctctggctcggacgacgacgacgacgacgacctcgccggcccgtcgacctcgactgccgccgccgccggctcggcatccaagaagtcgaaagcggccaagggcatccagcacgacttcaccggcgacctcgcaagcaagacgcccgagtcgacggccgactacgagcggctgctcctctcgtcgcccgactcgtccttcctctggatccagtacatgtcgttccagctgtcgatgtcggaggtccagaaggcgcgcgacgttgcccggcgcgggctcaaggccatctcgttccgcgaggagggcgagaagctcaacgtctggctcgcgctcctcaacctcgaaaactcgtacgggaccgaggacgaggtcgagcagacgttcaaggaggcgatccaattcaacgagccaaagacggtccacctccggatggcgggcatcttcgagcggaccgacaagccggcgaaggccgaggagatgttgaagcgggcggccaagaagttttcccaatcgtccaaggtctggacgctctttggcgagttttacctgacgcagggcgacgccgagagcgcacgggcgctccttccccgcgcgctcaagtcgctcccgaagcgcaagcacatcaagacgattgtgcgctttgcccagctcgaataccggctcggagacgccgagcgcggtcggaccatctttgagggcgtcgtcgaatcatacccgaagcggctcgacctctggaatgtctacatcgacctcgaggccaagacgggcgacgtccattcggtccggtgcgttctcaaagccggggcctcctgttcgcgccacgctcgcaaattgaccccttcacgtccctcccttcccctcagcaacctcttcacgcgcgccttctcgcgcaagcagtcgcttaagaaggccaagtcgctcttcaaaaagtggatggagatcgagcgccggctcgcgagcccgggcgacgagagcggggccgagatggtcaaggccaaggcggtcgcttacgtccagggccagagcgtcgctgacgacgaggaggaggacgaggattagattgttcgacgcatgcagtccgatagatccaacggagggacagaagggactaaagtcaggattgggacgtcggagggctgagcgtgggaacccgagttgtcgtctgcccgtgcccccccccccccccccggcccccgcgcgctgggcggagggaagggcgtgagagcgcaggtggccgggaggaggaggctgacatcgaacggccggatgcagaagaggtagttgaccgcacggaggagctctcggccagtcgagacctgctgagcgagctcgaggccggattgacagcggggggtctcgggcgaagcggtggagcgatctccgccggcgctgggcgcgaggaggggcgaacgagggtaggcggccgggaagaagcggccgacaatgagcgaccataagtggaagtggcgatcgaccgcacagaggtgctctcggtcagacgggacttgccgagcgagctcgagaggaccggcggtttccgctgcggcgtcttgacatcgccaagcggtgccgctaacatttcggcctcgggctggttgatctctgccgacaacgccattgacaggcacgtcagcgtgcagggtgagacgagggagaacgaggtctgcgactcaccgtcggcgatctccttgagcgcccagcgctcgagatcccgaaagccgccggactcgcggatctgcatccatcggcggcggacgtgcttgatgatctcgagccgcgtctcctcgacgagagtgcggatcgcagatcctgtcgacaggaaaggctccccggtctcggggtcgaatttgagcagtagcgagccgacaagagtctgagtgcacagttcaaagcaaggagaggggcgttatgtcagttggagcttcccaagacgagctgtcagagccggcagacggacctggtagacccgaccggcggccttgcaagaatcaggaccggccacgccggccgcaagatcgcccaagatcttttcgagtaactcgcgctcaaagcctcgaccctcgagcaggccaataaagttgtcgctggcaaagaccttctccgcgtggcggacgaggacggcgcgcgtcctctgctcgatctcgagcaccatgccgagcagattgtcagaccaggccgacggcttgaggcctcgcggctggaccgtccggacttcaacctcggtacgcgcccggatggcggtcagcccacgatagaaggcgacgacgccgtctggacgcagcgcggcgagcgtgtccctgacgaggccgtcacgctcgcgcttccccacgctgcccacctcccgaccccagcagtcggcccagtgacagacgacccattcgcgacagcgctgctcgagctccctcgcgccgacgtcgggcgcggcggcgaaccgccagacgcgcgggatacggcgactcgtcagcttggccggtggcttcgccgcatccatggcgagggagtcgcacatttcgtgcacaatgcgagcctcaatctcggatcgcaagggggccatctgcaggtagctcgccgcccgatgaatctgaaacgccgtctggaggtcatgcttgcggttggagaaggccagcgtgccggcgtacctgtcggacagctcacccggcgcatcagctcgtacgcccgccaagacaacaaagagccagagccctacgtacatgtagccgaggcagaagtggacacttgcaggcgtgaatggcgggctcgagagcttgatctcgctccgggcggggtcgactgagcgaaacccccctgggttgagcaggagctgggcaaagtaggggctccgggttgcgaggatgaacttgtgggcggaaaaggtcgccgtcgtcgaatccgtgtcttcgaggaggctctggtcgttaggcgagtggtcgggaccgaggatcgaggacgctccgggcctggcggcgccttggtcgagcgggaggacgagcttgacgtccgagaagagctttgaccgccacatatagacgagatcagtccggagccgctctcgcttgatctcgcccggatcggccggccgtccagcgtcggcagcgctcgctgccggcatgtcgaggccgacaccgaggccgacaccgaggccgaggaggcccgcggagccactgccgccgctcgtctcggcagccctcggaccagcgctctgttcgagccactcgatgacctcgcctatgccctggccggtgtagagccactctagctcggcctgaaacatctgcggcgtggcgtcgacttggatctggagaggcaggcgaagggtggcggccgactgcgcactcgccgtcgacgccaacgaggcgacggacggcactcgcaaggacaacgacgccatcgaccgcggtgcgagataggccgttgaagagctccgattcgagtgtaccggcccggtcggggacggcgcccggagctgagacggagggaagtagcgagcctggaaggcaggaggggctcgggcgtagacgatcgctggtcgagaagggggccagccgtcagcgcgagcacctttgtccaagcgcgagacagcctggcagcaccgcacctttgtggccccaaagagtctcggtaggtagcccgccggagtggaccgacgtcctagcgggtcttcgacgccttgctgtcaggctatcgtcgtcgccaccgctgccgctgtcgtcgtcgtcgtcgagcgcctcccctggcgcctggccgacctgccacgagacgtcgccgaagcgctccttggcctgggaaaagagcgcggccaaatcgtcttgccagacgtcggccgagcgtcgaactgagatctccaagggcaacagcggcggcaggggcgtcgacggtcgggacgctgcggctgctgccgccgacgctgccgtcgtcggccggagcgagctggccgaggccatgcaccagtcgccagagaggttgttgccgctggtctccgttttgctgtagtcgcctggacgagcaagctcgggaaacgagagacgaggcctgcgatggagtttgggatgacgatcgagggctaggcaagctcgggccttcgtcgcgtcggagggacggagctcagcgctcagcccgctcggtcgacctcgacgacgacggacgatgggcgagccttccttttcccagttcatctgactcgctgtaccacacaggggccgctctgatcctgccgcatgtcatctgaagcggccttcccttcccatgaggcctttgccgacgccgcccggagcttcgtcgtggcgcactcgcatctggccgcctctcgaccggctacgacgaattcgcttcgagagcgcaccaggacagtctaccaaggatggcgttgggttcaacctacggtacgacttttggcttcatccttcccgtcaacgacgtgctgaccagtcggacctttcttcaccagggtccttacgctcgaggctacctcatgcgctcgcgcctcgtgcgtctcgcgctgaccgctgcgcgaaggctgccggccgactcgtctcgttcgcccgaccaggtcgtcgtctcgctcccggccgatccgatgatagcagacgaggaagatccgtcgacggctatctgcccgccggcagcaaccgaaatgctccagatcacctgccacatcgtcttctcgtcgacgtatcgcaggccgcagatgctctgctcagcgcactcgcaagggaacgggacccctgcatcgctcgagaccctcgtcgcatcgggcttgcttcgccctccaggactcgcagcaccgaatgaggaggggattgcaatcgagctcgcgcccgagactgccaatggcgccgcctttcctttgctgggcttggccgagcacccgacgacgggcgcggcgatgtgggcgctccatccatgccacctggcagaagtcgtcgaagagatcttcgctgcagagtctccgcatggaccagctcgaaccgggaggcgatttctagagacgtggctgatggtcgtcggatctgtcctagacctctcgacaggttcatgaagcatccacaagaggcttccctgaggtgccaagtgcgtcgcccctctcatcccccctaaagccaaaggtatttgctgacgaggacgtgtgcgctccctatttgacgccctgctcgctatcggcctgacccggttgtcaggtgcggtcctgaacctctctccccggccggatcctcggctggcgcgtcgcgctcccgtctcgatcccgagcatggcttcagcgatgccatgagctccttctgcctttaaccacggcgggcgggctggcgagctgattgcctaaggaggtgtaccccatcggaacgcatcgagcctcaatgcatctgaccgggttcaagatgggcatggccccgcaagcgactctcggacgcgtgcgactcgcccgaggggcaatgctgattccgagagtcggcacgatacctcatctcatcttaatactcgctcgccctgcgccgggcgacgtccttgcttgtatgtactcgaggacattgcctgctcgctcaagtcggcgatggacctctaagagctcgatccggccgtctttgcgccctacgtccttcgttccgtctgacccctggttaagggggcgacgctgactccatctccttacccttctgcgccgcgcaacagatcccccagattgccgagggcctgatggcgctcctcgacgagctcgagacgctcgagggcaagcgccgcgtgctcggcgcggtcgaggttatggtcgagcgcgaggcggtcgacgtaggtccctgcctcgactctcccatccggcctgctgctcggctctctgaccgctctcgcaaccgcacagcagatcacatcctacgtcgccggcatcgcgagcccgatccctgagctctggttcagaggggccagcatcgagggcgagtggctcttcaaggcgtcgcttctgacgctcgtgacgagtcgggccttgacggccagtcgagcttcaacattctccgcttccttcgcaagctcgccgacaacggccagtcgatgctcgtcacgatccatcagccgtcggccctcctctttgaccagtttgaccggctcctcctgctcgccaagggcggccacactgtgtgcgtccccctgtgaggatgtcaaagggatgaagcggatgcgaagggggcaggggaagagcagctggaaggccgcacctctttgagccggagcagccgtttgtccatctgcgccttctcctccccgcgctccttcatcacccgatcgtacgtctcgcgcgggacgacgccctgtccttcctctccctctccagcgccggcgccgccctcgcggcgcagctggtcgatcagcgccgcgttctcccgccggagcgcatcgagcgtcgccgtccgaactgcaaggtccatcgtggatgggttcaggttgagctggagacagcggaatgacgccgggttgtattcgccgatggccacgcggcgctcgaggagatcattggctgcttcgagcgacgttgtgtgctgcttgaggtcggcgaggtcggaggcgagcgacgaatgctgctggcggagggtcgaggacgaggccgattctgccagcaaggagtgttcaaggttggtcagccgttgtcttcgaccactgtactcgaggagacgctcggatgcgcacccatccggagcgcagcgacctcttcctccctcgtctttaacagccccttcacctccgccagctcccgttcgagcgccgcccgctcaatgccagcctcaagatcccggcagcgccccgccaggcgttcgacctcgccctcaagctcgccgacgcgcgccgtctggtcggcgcgtttcgagcggaggaggctgagctcggcgcggagctgcatgagctgggcgtcttgcgaggaaaggatggaggattggcctgcaagtcgttgtcgtcgtcgtcgaccgaaagcgtcgaggggtcaaagtgtcagtcatgcctcaagccgacaggtctaggaggagaaggaggaggaagaggtggaggactttacgtttgagctcctcgcgcatgacggccgcgccctcgcgctcgccctcctccctcctcctcccttcgagctcgtccatcaactcccccaaacggcgcctcatgctctccctttcgccctccgttcgctcacacttctccctcgcgagctgcgcatcgtcgtcgctcgcctcgagctgacgtgcgagctcggcgagctcggcctcgaacgacgactgggcgcgcgagagcgagacggtcaggttggcgacttgggccgagaggctgccggcgttagctatgcttgaggagaggctcaagcggagctcgtggatcgaccgctgggctttgctcttcagaacccgcgcccccaaaccggcgttagcagtaagagacgagaaagcgatcagaagacgcgcggggacgtacgagctcggccgcctgctgctccctctgcgcgcccgcctcgcgctccctggcctcctcatccgcgacgagcaggcgcatcatgttccggacgtcctcagcctccctccggccctcctcgacctgtcgtctgagctcgcgctcacgctcctcggctgcggcgagccgacgctcgaggtcgacctggagcgccgtcgacgcgttcgtccggcggagaacagacggcggctcttcgcctcctccgccgccctcgctcgtcgacgtccgcttgctgccgaatgggatccgcgaggacggcgtggcgggcattgttacgcctggcggacggggaatggctgatgtatttccgagagcggacgacgaaggccggcgttcgagcgtccctcggccgccggagggggttggtgctgccgtcagcgcgcctgctggccggcgcgtagggagaaggttcgaggatgaagagggtcggccggcggcggacgaggatgtcaatgccgacgagggctgaaacggtcggcggtccatcctgggatcagagagatggcgttgagggacggggaggaggtcacgtcgggcgatggacgtcgtcgagcgtaagggcggttgttcggaagcaaccgggtctacctccgaaaggggcttccggcaaccgaccgaacctagctggtcggccctcttgcagcctgtccgacgacaccgacctcccgactgctcgcagtaaccccaatctctaaagtaacttctataatcacctcgcaccgatggtcgcacttcctcccttccccgacggcaagttcccaggtccgtttaatgtgcctccctctcgtcgacaggtcgtcgacgggcagggcagcttcccctccccatcaccaagcggccctcgaagttgaccttccttgctcatctctttcaccacgtcctacagctctgattcgtacgtagggtttttctagtgctgttcttgagttgggaggggcaggtcggcttggcggaacggcttctcgcaaagttcggctttgaccgacggtcagccgggctgacccccccgccggctgcggctcgcggtcgacggtccttgctcgtccagtgagcacgccgatcgttggaaggcaatgtcgctgactcgtcgcaccttctgcgcacgggccgcagacactgccaagctgctcgagaagctcggcccgggcctcgcgcccggccggcacatcgtcctgctggtttcgcacccaacgcccttccggaacgacacggaccgcgagatgcctcaccggccagagtccaacttcatgtatttgaccggctgcgacgtccctggtgcggcagtgacgatcacgctcgaggttggcaagggtggggcgctcgtcggcgacttcaagcacacgctgtacgtcgcccttcatccatgcgagacagaagcgccctggagttaaccccgctttgaacccgcaacccctagctttgtccccccggccaacgaggacgacattatgtggtcgatcccgccgccctcgctcgacgtctgcgccgagcggctttcttcgcacgcctttgagccgctgcctgccctcgctcgcgtgctctccgcccttccgcacgagacgacgctccacaccctgccctcgaccatcctcttccctgcacttccgtccgagctggcccagacccaggtcactcgcgcagagaacgtcctccttcctgctctacaccaggcccgcctgctcaagacgccgcatgaggtcgcgctcatggcccgcgcgaacgccatcacctcgcaagcgcacgaggtcgtcatgcgtgcgctgggcaggcatgcggctggccgaggagtcgctgcaaagggcgcaagggcggaggagcgcggaattggggcgcaggcggctgagtgggagatcgagggcgagggcgacgcagaggcgctgtttgtcgccgcttgccggcgcggagggtgcgtgccaattctctactctgctcagaggagacaagatctgacctttgcccactccccccttgtctcgcaccaggtcgaagcacctctcgtacatgccgatcatcgcttcgggctcgcgggcctcgacgctgcactacatctgcaaccacgcgccctttgtccacggcgccctgccaacgacgctcgactcgtcggcgttccaagcgacggcccaagcgtcgcacgacggtcacccgcacgacgggcctgacccgctcgtgctcagcaccaagggcgactggcagccccaggtcctcctaatcgacgccgggaccgagaccgactgctacggggccgacattacgcggacgatgccggtcggcaacggcgggcgcttcacgcccgaggcgcgcgagatctacgcgctcgtcctccacatgcaaaaggaggccgagaagatgactcgggccggcgtccactgggacacgattcagctcgcgacgcatcgcttgctaatccggggcttcctcgagctcggcatcttccgcgacgccgacgaagagacgatcctggcgagcggcatctcgaccggctttttcccgcacggcctcggccactcgatcgggctcgacgtccacgacgtcccgtctgcgtccaaaccggacgaggcgaccaacagcacgatcccgccggcgtcgcgcgaggtgcccgagctctatgcgttccttcgactgcggctgccgctcactgccggcatgctcatcacgatcgagcccggctgctacttttcaccccacctgctcaagcgctggcgcgactccgagttcatcgactcggcagtgctggcgcgctatgagccggtcggcggtgtccggatcgaagacgttgtcctcgttgagcagaacggctgccgcaacctaacgggcgccgtccgcgaggtcgccgatgtcgagcggctctgctcgggcgcctagaatgtcgatggtgactgcttctggacaatgttcgacagacagcggactatccaggtcaaggagtcccagacccgggtttcccaagttgagcgagaagtggtagatctggtcggatcaagctcaaaccttgctcactgagagctgaccacggtgccggttctgaatctgccgcctaatcgaggggtcaatcaggcggtcgggtggaataaccgatacccctcggcaaggggtacatacttttttaccgaatctcatccgattcaaagggactttgccaggctccaggctggtcggccaggaccaggcgagatgctgacgacaagtctgtcggcgatccagtcacaaggacagccggaaagccttgtaagccggaaagccttgtaaggggggtccggggatctcgcgcctgcgcgggccgagtgactcttatgcaggatcttatcggatcgctgcgagaccggtaccgctgaaaaatcctcgacgatgcgaccccagaccaagagcattggccgtcatccgatcagagggtgatcggctagcttagagggagagtgcgcgcgggtcccggggcgcaggttgctgggctactgcgcccgcacgcgcggccgcccgtttcgacctgtcgccccccttcgctgcctgttgacgaccaccaaccatcctgagagcagcaagagtgtcaagagagtcagtcctgtccgtgctgtcgtgggccgtcgtcggggcgggcagggaaacggcctttaggctgctcactcagcatagcggctgacaaccgatcccaaccttgaatccgcccccgccagccctgcctacctcctccctcagcctcagtcccagccgccaaagccgcagccgctgcagcgcatccgaggctcgttcccttcggcgacctcactcgcgagcagcgctggcagcaagtcgtgcgtctcgcccgcgggcagtaccgacagccgggcgtcgtccttgaagctcgcctttgaggacgcccggccgtcgcccgaggcgttcaaggtctcgctcatgaagaagggccagggctcgatgcacggcctcgctcggagcggtggcagcacctatcaagtgggtcgactcatgcctgcgtcaactcgcaattcgccgactgacgatccctcatctctgcaggccccgccaacgccgaacccgaagatgagccatcggcccgtcccgcatgcgtgcgccgaccgctcgccgcacacgcacatgtcgccctcgctctcgacgatccctcgatcagcccagagcttcctctcgcactcgctctcgtgccgccggccaccgacctcgtcgctcgcacgctcgcagcagcctccgctcgccgcttcgtggtcggccggttcagagtcaagtgcggcggcatcgagccactcgccggccgtctcaccgcggcacaaaggcgccgggaacctcgcgccgcgaggaaaagacggcgagctgctcctcccttgcggcaaggccgtgtcgatggccaagatccaagcgcagagcgacttcttgctcgcggtcgacgcgaccatggccgagtcacctgagcgcgtcaacggcctcggttttggtctcgggcttggtctcggcctcggaattgggcttggttcgagtggcagtggcttccccggcttcgaacaggccgccctctcgcgcgccgcccacaagtcgtcgcgctcgcgctcgcgtcgttcgggcggcatcaagcgcaagggctctcaccttgatgcgccctccctaccggctgtctctgccttcgcgtccgggccgacagcctcacccttgtcgccgccgtcgttcagcgtcgcgcgccagggcggccggccgccgctcaagcgggcgtcgtacgccgaggatgtcttcggcagcaagtttgagatcctcggcgaggtcggccgcggcatgagcggcggcgtcgtctacaaggcgctcgaaaagcagtctggcgtcgtcgctgccgtcaaggtcagccccgtttacggcggcgtgcgggatcggtgcgttccttcatcttttcttacgctctgtgcctgtgccgccacctggctgacctcaggccgcttctttcgtccaccagtatccgccacctcgaagaggtcgacattcttcggatgctctccaaggtgccgcacgcaagcgtcgtcacgctgctctcgagctgggagcaagccggccggctccacatccagacgccgctcgccgccgggggcgacctcgcaagcttcctctctgtcctcgccgactcgccctcggcaccggcgtcgttcagcgcctcgatcggcgagagcccctcggcggccgggctcgacgagggccggacgtggaagctcctcggcgctcttgcttcgggccttgcccacatccactcgcttggcatcattcaccttgacatcaagccggccaacgtcctcatcacgcacgacaggcacgtcatcctgaccgactttgggaccgcgacgtgctggccgcgcaagcgaccgtccgagatcctccgcgggagcgggatgggttccaccgtcgtcgacgagttgacggccggccccgtttgggaggaacgcgagggcgaccggggctacctgagcgccgaggctgtcaacggcgtcgtcagcccggccggagatgtcttcaggtgcgtggcccgtctcggtgttgctctcgcgaacccacgactgattgagtgacccgctctctcttcagccttggcctgctcctgcttgaggctctcaccaacatcattccgccctcgaacggcgacgcttggacccggctccggagcgatgacttcagcgacatcgaagcgccgccggcgtcgcccgctctctcgtcctcgtcgacctttagcccgcagctgctcgactcggccttctcgacccgctcgtgctcgtcctacctcggcgcccactcgcccctcaccgagtcggacacgtcgtcgctcttgacgccgtttggcggcggctccacgccgggcggatcgaccctcgcgggatgggcgtccgagtcgctctcgacgctcgtcaagcagctgatggcgagcgacccggcccgccgaccgaccgcaaacgaacttgccagccaccacccggtcctcaatcgcgtccggcagctcgcggcctgcccgccactcgcaaacgaggggccggccttcctcggccagatcctcgccgacgccggcagttggccgaggccgagttcgctcgcaccgccgttcttcgcaccgccgttcttcgcaccgccaccgccggcggcatcgtcgacgacgacgaccggcgccaaagactcaacggtcgacctcgcgcgtgacctcgagaagatggacgtcgacgtcgacctctcctgctaaattcccctctcttcctcccctttccccccgtctctcccgccttcacactgtagacctccctttgccggagggcccacccccttatcttcgcctcttcgtctcctgtcttccttttccgccttcgtatccggccccctttcaccccgccgcccttccctcgccctgtcgtcgcaaatacatactcgtcccgctatcgccccaatgtattcgccccagcctcagctcttgcttctgccccctctatcgctcacatgttgctgcttttttctttgctttgaagacgggcctcgttgacggatcggacccccctctggctctttctcatgcgggtccgtccgtaccttctcgttctcgacttggcctgaccaactagttgacagaccgacggcgaccttctgctagaacccaccacacctcgattgtttcacgagtttgcaaccggaagtcgccgtctttcgaagcgggtcagtcaggtggtggaggaatcggaagaggaggaggaggaggaggaggaagggagcagcaaggtccgccgtcggcggccaacccgtcgtcgtcgcttgcaggaatgcatcatcgacgtcgccagagaagccggccatgccatttggccgatcttgatcaacggctgacggtcagcgagagtaggacatgggatggctctcggccagccaacgagacgcccagcgttgaccgcgacgacgctgagtggccggcccatgagcagcgaagtgccatctcgcctggccatcatcatcgatggtcccacctgccgccgcccggacccgagatcaacctcgcctgtgtgtgctccgaaagcgtcggcggcttgcgacggcgttcggcaagagatcggagggaacgaggctcgggcgcagagggggactcgcatggagcccaccgaccgtgcaggctcgagttctcggcccagtcgtcgacgcgtcgagccggaaagtcgtcccagagtcgtcctgcccggtcagctcgctcgtcgcagcaagtcgacagcagcagcaggagaagaggagcagacgacggtccgctgtctggcttgctagcagctcttcttgttcaggcgaagcttgatggatggcggtgcccggcctctgctggtcaggcccagtcgatcgcctcaagcgggcgttggtcccctttgtccgcttcgctagctcgggtctcgcccctccgaaccggcacgcccgctaggctcgtaagagcagcagagggcaaggagggtcgagccgggctcgcaagcttcgtccagctgacggctgctgctggctgctgctgaccgccatcctcgactctgccagcagtctcgctcgccgcacgcagctcgttctactcagccccgccggtccagtccggctagtccatgcccttgcccgtcggccgttcaccctgcccgcaagccgccgtccttccgcctttctcgtcgtcgtcgcccgaagcaggcccgtcctcgctctcggccccctaggcacctcattgtagacctcccgtcttcctcggcctttgtcgtctcccccgcgcgcccgcccccatggctagcctcatcgcctggttcctcctccgccgccgacgctcgcgctcccgcacgcgttcacgcccacctccttcggccagcgagagcggcggtgaggtcgaatacgacgctgccgaggctgagggcgaggggagggggaaaccgaccgagagcgtcggtcagttgaccgtcgtcgctagtcggggcgagtcgcccgaacgcaagtttgtgagttcgtcgtcgtctctccgaacccctccttccgtccttagcgaccgagtcaactaggaaccgcgccgcagccgctcagcagaggacaagaggtctgactctcccccgctcccctcctcctcctcctcgccgcagcccaagattgtcgacggcgcgctcggctacccctcgccgcatctcacagtcaaccacctccccctcccggcctcctcaccctcttgcgcgcccgagggcgtcagcagcgcgacctttgcgggccggccagtctcgaacgcgggcgtgttgggcaacggatgctcgggggcgtatgcgccgggtcggacaaagtggaagggcagataggcggacccgatgcccggatggggtcggtcggtcggtcggccctgggcgcacgaacgggttgcggtcgacgtaagctttcggccccgggacggactgacgtgtccaccgagcgttcgccaacgttcagtcggtcagtcggccgacctcaagccccgagtttcaaccttgtcctttcctcaggccctctcctcacccccttcccagccccccttctgccctctgcctctgcgaagcccccgactgccatcacgctctccctgactgacctctcggccgacctcctggcccagctcctcgctctaaagcctctccccactcagacgactctcggcagtcagcaatctctactcagagcactcagcagcctccttgctctcttgcctcgtcgtcctttccgtatatttcctccttcggctgacagctggggctcgtcaaagaagcagacgcgcggtatgcatcgatcgagcgccgaccgctacttgacagcaacgccgacaccgcgctcgtcgatatactgcgcgagaccgaccatcagacgctaggtcagcgcaatgcttcctaaaaaagtgatggccgcaactatgtacctcgccaacagttccgaccttgccgcaccactctgcgagccgtccagcgagcgcctcgagctgactccggtcgagcactcggggctggacccaggtgatggtcgacgtctgcgcgatcgcatcaatcgagccacggatgagcttcaggctgcgaggcaatagggacccgtcagctacaagagggagcaacggacgcaggcagagttcatacgcacgacagtgccttcatgatcaagaactcgacctcctcaacggggaccttggtctcctcggcgatcgtctggaaggcgagcactcggtcatccgacgcgcgcttgaagacgctctcgatcagggccatcaagcagattttctgccgaaggaagggcgagttctcctgcaggatgggctgtgagtgacgagggggccagtcagtgatcgtccgacggccgtctcctcgtcgtgcttcagaggcgcacctcggtttggaactggggcaccagcgactcaaacttgccgatgtcgcccgcattgaaggcaaagagaagcgtcttgatccagctgtgctcgccgttgtcgagcgcctccaggaccgggtgttgcagctgagtaaaggccggcagaagatcagcagacgccgattctgaccatggccgctcgaaccggacgcaccagctcgccaaagttgtagatggagtcgccgagaagggcagcgatcgcgagatcgtgggcccgagcaacgagctcgtcgctggacagctcgcgcaggtcgacgcaggcgaggtagagcagcgcgttcttgtagtacggcccgtactcggcgttgaccttaaagtagtcggccgagacgccgtagaagccggcccagaccgagggctcgacgctatcaagctcggccaggagcttgtcgctctcctcgatcgcctccttcgtgcccttcaggtcacccagcaggagcttgccgtacgcgagagccgagagcgagagcgcgtaagcctcggtcgctggaggtggcggcggcggcgtcggctcagacgtctcagcgttgggaggcgggtggggatgcgacagtcgcgagtgcagagcagagaggaaggagagcgaggcggtcgggtctgccgcggcatgtgggtctccctgtcagtcatttaatcactccgcgtcgatgagcagcagcagagtgacggaccttcgatctggcgggcgacgagccggcccatctcgaccagcctcagcgggttgagcttccgctcaaagtcgcggacgaacctggaggaaaaggaggaacacgcgggtcagcccggtcgatcctcaagaggaggcctgcgcgccaggcggtggtgacgcacgaggtgaacatctcgacctgctgaggacccgtttccggcagcttaatgtagcgcaaaagcccgatcgtcaggttgtgccacagcctgatcgtaggaggagggcttgtcagtgcttggccttggacaggtcggagggagcagtgccggcgactgacttcttgttgtaagccgactcgagctggttgatggcctgctcggcggcaggcgagggtgcgctcgccttagcagaagcgagccaggcggttggtgacgggtcgacgtccatgttgcgggctgacaggagtcgaagagctgctgaggagtgtagagagcgagaaggagaggtgtggctgatggtcgagaatcgaggtcgggcgaggcggcctccagcgcgagagagatgcaggcggccgcgggaaggatcggacccgtaggaacgcatcgccccgcaggcgcgtgccagcgcagcgtccccgctccgaacggccgaaccgacgcgacggccagagcaacgacgaccgacagcgacctcggaaaagcaaaacgacctgcctcctcatcgacctttcgtacaagccatggttcgtcgtgcaatctcactcgagagggttgacctgacctcgcaagctgacctgccgcccggccggcgctaccgccgcggccagtcggatctcctcaagcagctcggcctcgcccatctccggccctacgacctcgtcgactttcgccagccgtcgctctacctctcggtcgccaggtccgtcggccgctcttctttccgtcacttatcagcgggcctgctttccgtcacttatcagcgggcctgacaccttccctttggtccctgcagcatcatctttaatccgaccgtctggaacatcgtcgctaggaacggtgcgtcgagcctttctcgacgcacgcattcttgacggcgccgaccgattgaccaacgcgcgcacgtcttgcccggcagagcactacaaccggacgatgacgcgtgcgctcggctcgccctaccgcgcctgctacctgatggccatctgcatttttggcttcggcatcctccgcgacggcctgtgcgagctgctctcctcttcctggccaagggttttgattctctccaactgacgctctggacacgcttgggacctactcctttctctacagctacgagcgcgccctgaccgcccagccgcagacgctacccgattcgttggccctcaaggccgtcgccgccggcctcttcatcgccggccagatcctcgtcctctcgtcgacctgggcgctcggcgtgacgggtccgttccgcaatctcgcctcggaggataaggccaaatgatcagatggactgacggatgtgcgacccggctccaggcacctacctcggcgactactgcggcatcctccaggacgcgatgggtcagttgcgagcatttgctgacgtcgatgcgcgcgtcggctgctgacgcctcaatctgcattccttaagtcaccggcttccccttcaacgtccagaccgacccgatgtacaacggctcgacgatgtgcttcctcggtaccgcgctctggtacgtcgttcgctcgtccaggccagtgtcagcacgccaggctaacctccagcactaactcgggtaccgctgcggacaggtaccgtcggccggccggcattctcatttctgccatggtcttcctcgtttaccgggttgctctggcctacgaggggtgagtcactcctggccaatcctccgacgctcgggatctcatcctgacctgcctacccggtcgcttcagcccgttcacgtctaacatctacgccgcccgcgagaagtcgcggcagtcggccggctctgacaagtcgccgcgtgccgccggatccgacacgtgcgttgcgaacgaatctcatctggcagtagagacgtcgctgacagacctcctcaatcgctgcacgcgcagaacccccggctcgagctacgcctcggcagtcaagacgacgtctgacaacacgcccgagacgcccggtcgccgcacgacgcgggccagcgctcgggcttccggcgccaagggcgagctctagacgcgtcattgagcgcacgattcaactctcggacctgaccgaccctcccgcggtccaaggttctccaacccaatccaaccggcgacgttcaaccaatgtccagcatcaggccggaggcctgctgccctttacagcgtcccactctcattacctgagatttgagcatgacgcagcaggcttgcgctctacgaggcaattgccggcgctcgattagcgaccggatcatagtctcgcagattcatggtccattctgcttcagacacgatgtgccagtcggacaaaagctaactcgtatgaaggccatgcgatagtggcgcgtgcggcccgactgactgcgacgtcttcggcctgtcgcgaggtcggcggccgccgagcgcactaacgcgctgaccttcgatgctgtcagagcgccgcacaggcgcgcatgcctccctctcaagcttgcggtcgacgccgtcgagcctgctctggcgttcgcaactaaggcatcttgctcttggtggccccgctcgttccctccagtgacgcaagccgaaatgtttaagtaattacattttttatcgctgcgtctatgctacctctttttccacccggaccgagacgccatgacctcgaggtcgtcccgcctcagcggcgttggcccgcgtatcaaaggcgtatggaagctcgtcctccacggcgaccttcgagtcttggcggctgacccaatgttgctcggacggagaagtgaccgtcgtgccgagcgttgaaaggttgagcgaagcctcagactgaggccgtctgcaggagaggtgaggacgtttcagctcagctggtgacgaaaggcctcaaatggtaagcgactcacccgcgtagctttgaatgaagagaaagcgtgccgtgataggccgagatcgcacgagacgtaacgccgtcgtgcatgccgaagcataagaagtagacgaaggacgccactagaggcaaccagctgctgatcaaggtggcattgtgagcagctggcatggcttccacttgcgcatagctgagcttgaagacgaggtcgaagttgtagtggacgtcggcccagctcagcgtcggttcgatatttttgatgtggaaggacatcgtccaggcgatggtcggcacggagatgagcatgtcgaaagccgccccccccccccccaatcctccagtgctcgccctgctcgcaagccaccgcgacccgcactcgttcgacaccggcgcccaggacggcttcaagcgctaccaggctcacctgacgcgcgcccttgcaagccagcgcaaggctctaggtgtgagcggcaagggaaaagccgacctgtccaaggtcgagggcgacgctaggtgcggctctcggttcgaccgcgcgccggtcgagtccgcctggctgacttgtttgatggtctgctctcctccaggtccgtctcgcttgtcctgctctctgccgagcgagcctacgccgcttcgctcgcgcccactccgccgacgtcggcgaccgcacactcgtccaagtcgaccaagcagcagacactgtcgcggcttcagaaggcgctctcgtacatcccgcagctgctcgcccttccctcggtcgcagcttcgcccatcgccgtcgcccaggcgaccatctaccagctcctcctccaagcaacgcgcgcgctcaaacgcgacgacgcagagggcgcgctcgagggcttcgctttcggcctgatcgtcctccgcgcgctcgagcccaagctcgctgccgtcggcgctgctcgcctcggcgagtgggccgagcgcgactttgaaccggcgctccgcttctgcgcgtacaagctccgatcgtctggccagccgactcgcgacgtcgacaacatcctcgaggactttgcgccgctcgtcggggagctcgaaggctcgttcggcgtcccggccagcgtcctggccaatgtcaaggccttgtccgacgcctctgccgaggaccgccggggcggtaccctcagctggctcggtcagactcgcaaggtgcagaacgcccggcttgtcggtgccctcgctcgcctcgcgagcgctcggctcgtccttgccgagaagtacggcgtcggaggcgacgccgcctccaacgcaaagtgcaagtgggacagtaagaagggcatcatcaagacctttgaccggatcttgctcgccgcccgctctgggcgggacgttatcgatgcgaccggggcgggtttggacggcaacggcgggcaggccgacgagggcacctcgaccgctttcttcggcgactatcttgccttcgtccaggccttgacgctcatccagcgcgactttcatctctttcaccacctgctggtggccggactaccgatcaagacggccggatccgccagtcagccaccacagtacgacgcccggacgctcgtcaagattgtccgcctgctcggcgccaccgttggccagatggagacgattggctcgctcgccagcgttgaacgcggcacgcgcggcgagggcgaggcggtcgaggttaagatcggacgattccggatccttcggtgcgtcggctctcctcttcttccgggtaaagcatcaacgctctggctgatcatagactcgtttccctcgcccctgcagcctctacttcctctcgcttctctaccttaacccgcacccgtcgctcaactcgccgcagaagacactcgccctcctcccggtcctcaccctcctgctccgccaggtcgcacagtccttcccctcggccgactcggaggacgaggacgaagccgagcagcgcctcgcctggccgctgtctgaggaggatcccgaaacgggcatcgcaggcgagttcttcaggattgaagagcgcgtcggccaggccgaggtcgaggccaaggagcagctttggctgcagcaggaggtttccgcatctccagttgcttttggcgagcccgccacaaaggaggccacgttcctcgacctcgccgtcaactttgtcgacctcgacctgcgcgaggaccttcctgttgcgaaggcacccttgagttcgactccgtcgtcggccgcaccgacggccaaggcgcccgccgtcccggctgcatcccacgacgacgacgacgacaacagcgagtcggacgaacagccgttcgacgacgcgcaggacgatggcggcgaggaggccgagagggacgaggacgagggtccgaagaagaaaggctggcttggcggctggttcggacgtagttgaaggaggcagcccggaaggatgacgatggctccgatgcaaccatgccttgcagaaggagtagcagagagcaagcacaccccctcatacctggccgacgtttgacgagcagacgctcagatgctttgctaggctcttcctcgacgctctcaattgaaagtaggagtgacaccttgcggaccggagacatactcgccagagccgtcatcaaagccagactacggaagacgtttacgtcgctcgaggagaggatgcgggtgatcggcatggtcgaggagagtaatatcctttgccttgaagaggattgcaaaggccagacaaaacaggtcgctcggactggccagatggcagctgaattcaaaattcaggaggctgatctcagagtgattggggaggagcgcgggacgctttgaggatgagccggcggcgggccggtaaaggacgtccgacaaggctccggtttcgccgtcctgttagccgaaatcgcacttctggttgctgaaatcgagccgtcgcaagtggggcagcattgaaaagggcagtcgaagaagagagtcgtcggggagaccgaggcgttcgacgttgggcacgagcgaaaggagatttgacggagctcggtgatgcccttcggtgtcgatgatccagagtctcaggctcaccagcttgggccccttctgttcaagcgccgagtagagagccgccaatgcgatgtccgacacgtgagccgccgcgatggagagattttgaagcgacggcggtctgccaatggagctaactcgtcgagttccgacgtcagcgctgctgcaagatgcggacgactgacgtgctcacaatccagtctcgacagacttggcgaattgagacgagctccttctaacgcgacgagtgcttttcataccagttcaatttgttaacgttccacgaagacgtctcgaaggttgccttaaggatctgctcgcgaagctcgagcggcagcgagcggaagccgggcatgacgaggtctgggaaggtgcagagcgtgaagccggcgtcggggtaggcgacgagcaggactgagcgcgcaacggacgatgtctggccggcccagcaatatgcggtaggtcagcgttctaaatcgcgcgagagccagaggaaggagcaagacctacctcattcgcgttgtaagctgtcaatttgagttaaagtgaccagcggtgagcggggtggaggtcgatagaacgaagcggaggggacgagcctcaccgagactggttgggcatgctgatgcgcagtcagccgaggtcgtctcgcctcacctgctatctgaccctccggcccgagatgacaagggcagggcctcgatggacagaccaaaggaagagacggctctgtctagattgtgctgaacctttttgtgaaaggtgaaagagatgctgggtttgagcaggtcgtgcgagcgcgcacaacgagacaggccacccgccgcagctcggcttgccttcaaccggactcgcatctggcggcctctgcatctccagctttatgacctgcgactcctggaaaggcagaactttcttgtaggcctcaggtgcgacctgattcccttccagcgaggcgatgagtgagccaacgctctcggtcaccgcagcccgcttgagccgtcaggcccagaggcgaggccgcgccatctttggccgagcgtctggtccttctcctctcgacgttgaccttgccgtctcctcctcgcaaccatccatcgcccgcagacagtctagctgctaggaacgacgagcacttctccaccatggctcacctcgctggcctcggccagatcaagctcaagaaggcggtgacgaacgaccgctcgactgcctcggtcgccggcgtcgtcctcgactctcccgtgccatcccgatcatcacctgctcggccgccgccgccgccttcagcagctcaggcggcctacagtgacgacgacgacgagccgccgagaccacagctcgccggtctctttgctggcgggatgccgactctcaagaagacgggtgccggaggaggaggtgcgtcgctcgccacttggctctcggccgtttgacgctcagaggtgagatggccaagctgacggcccttaactctctgtccaggtgccgctccgtcagccccagctagagctccgccaccgccgaaaagtgcgccagcgccgcctgctcctccggccgctccacctcgagcgccgccgccgccgccgggccgttccgcgtgcgtcacccgtcatccttcctcgctgacggctccttcgctgactttcgccttctgccaagcaactttagacctcctccgtgagcttcagtcatgtcacccgccaggtatcatctgatagagaccttcagtctgacgctcgtttccgtctgccgccctctcgcagccctcctgcgccgccggctccgccatctcgcagccgccctcctcctcctccagctcctccgccgcctcggccatccgccgcaccttcagcagccgccaacgtcgctcctacgcttcccgacggtcgaccgaacctcggaggactcttcgctgccggcgtgccgagcctcaaaaagactgacgaggacggcgacgacgcgccccggcccaatctcggtggcctgttcgccggcggcatgccgacgctcaagaagtcgggtggcggtggcggcaacgactcgcctgctccttcgcctcgggctgcaccctcgcggactccgccacctccgagcgctccatcgcgtccaccccctcccccggccgcgccctcacggcccgtatgaagtgccctgggggtgaagaggggcgaagggaattcatgcggcgtgggcgggcatgaacttgccgaacgggtctggaaagcagtgtgcaaagttgtcagcgaagagattacgtgcagaaagtcgggaggggggagaactgacgcttgagcgagtggaccttcctcggtttgtctgcccttgcctcccagcgctcaatcttgacctcgtagaccctcatcctccccacagcgcccgatccggcccatctcagcctcagatattggccttcgacgccgacgtggagctcgagcgcctcgccctccttctccggccgaccctgccggaggtcgaccgtcagcttgaggtccacctgcgcgctcggcgcgtccttgctccacggccggataccaagcagcgggcttcgctcgggccggcccgtcaggtgcaccgactgctcatgcgtgtggtggtggccgagccggtccggcgcaaatgtgagcgtccggcgtgggaaaccgaagccgggcggcttggacgtctcgccgtcttcgaggcagttgtgctcttcgagcgcaaagtggagaaagctgatgacgggcggcagccgggtcgtcgtcgtcagcttgcgctcgtggggacgctagtagactgcatggcgtagaacgccggttcggcagacgctcacgggcagtaaatgaccgactcgggctcgtcggcgtcggccgagacgtttgcattctccgacaggtcctgccggatcgtcatttcgcagaccgagtcgttgatgtcaaagtcgagccggtcgactgtcccgaccagggcctgcgatgttcaaccttcaggcatcagccggccagacgctcagacaactgagggacaggagatcgcgtcggacggggggttcgcacatgggggtaaggccgacagaaggccctctgtgcccgacagccgaccgtcagcaggtcctgaaggtagtttggccggacggcctcctcgcccatctttgcctgccagtcggcgaggcagaagatcgaaaagtcttcgccgttctagccgggcggggggcaggccaggccgtctcatcagccggggaagtcggttgggaggcggtcggaagcgagagagcgcacccagttgtcgcccatctcgtgcgtgttgtcggtcctgcaacgaaaaacaaggccagccagggtcgtcagccccgcctctccctgctacttgctcaatcgaactgcccgctaggccgcaccggtactcccagagacagaagccgagcgccttttcaccctcgcagcccgagaggttctggtcgagcgcggcctcctgcgtcgcatagtcgccgtccttgccgccgttggcaatcaggccaaaaaaggcgtccttctgcttgaagtcaaaggggacgccggtcctgaaaacggatggacagggcgtcagggcttcctcggacgcgacgctgaggaagtcggggtttggggttttgatacacactctccgatgatggctgggtacaacttgaccttgtcagagctcagcccgcggtctgggtgcgtgtcgccgatgctaagcgcgtgcagctgctcgcggatcgagtcgcggatcgatgacgagccgagcttgggcacgtcctgcgccttgatcgtgtgccgctgcggagggacggacgagtgggcttcagattgggcattttctgcgaggtcgatcgagaaagcagcgagactcaccatcattcctacagcgtcgccgttgaacttgtgtaggcgcttgttgctggtgtgttgaagaagggaggatcagaccgagcggcagaactagcggacacgcagacgtacagaagggtgagaccctggaggttagagacgaaacagagcgtcagcgcatgaccggcaggatgctgcagaccacaaagagacacgcgcatcgtaaaagtgaggcgtcaggcagcaccgcccgccctgatcaacctcgctcaactcgggcggcttctcaaataccggcgggttgacaaacgaaatcgcgtttggctgcgtctgtcggatccgcgcgttccacttttgccaggacgggacccaatagtcttggagaaagttgagctcggccggtcggtcgtcgtcggcatcgccgccgctgctgcgcgggtgcggccggtgggcaaagtagtcggcccggagaagctcgccggacttcgagttccagctgcgcaagaagagtagccaaggagaggaaggtcagcagcccgagcgatgcgcggaatggaagacgtaagctatcgactgacacgccgtgctgctcccaaatacactcgcccagccgccagctcgcgtcgcgcttccagccccagggcgagacgccctttggctcagccgacgggtcgagccagcacgagacgccctccgggtcgacgacggcatggccgtctttgtgcgcgccgagcttcccaaagcggtagtttgcgacgcggactttgtggcctgcgccgagccggaagccctcgagcggcgtcggcgtcgggccgagcttgagcgactgcttgtccgacagcttggcaaggtcggccatgccgaggaagccctggagtggctcattcatcgagtcccaccccatgacgcagacgtcattcaggtcgccggccgctgcgatccgcgcggcaagcgcgccaaacgcctcgacatagtgcctctggagccactcttgaatgttgacgccgtcgatcaggcatttcggcgcaaagtcgcgaccggcccagaagagtgtgaacgcagtcgcgcacgcgagccggaaggcgtttgtctgccagaccatcgccggccacggctcggccggcgtctttccgtcgcggcctttccagaggccgtggacaacggccgcttgggtggcttggaacttctgggggtcgaggccgcaggcgagaagcgtccagtagggcgcgcccgagccgccggtcgcacgcgaccagacgtcttggtgcgggtcgatgactgtgggcggtcaagggggcaggaagtcgaaggcaagagggacagtcagctgctgagcatcctgaaaggagaacgagctgagcaggactgacagacgcgcagaccgaccgccttgagctcgcgcaggagccggacgacgtacgccatgtaggcctcgtcgtacattcccggaccggcatgctcgatcgcctcccagacgacagcgagccggacggcattgaagccccagccgacgagccgggcaaggtgcactcgccaggcaccgtccgtctcgtcctcctcctcgccctctttcccatcggccgcgtcgcggcctgggcgagctcccccttgagggaggacgaacggcatatcgacgaacgacacctcccctgccgtctccggctccgccggccggccgaggtggtgcgcggcgtccagcgttggctcgcgcggcggggtcttggccgtcaggttgacgccccggaggatgacggttcggccttgagcgtcgcggaacgagcctttccaggtgtcaagctggtctgggtgaggatcattggccgcggcggccttgttggatgaggataaggaggaggtcgaggtcgaggcggaagcgtccgaggcgccgttggctgggcgagctgctgcgtcaggatcggcgtctcgagccgcagagccaccattcgtcgtcggcggcgacgaagtggctgtcatgctgttaattgatcaagagtagtgacagtcaggcgcaggaggaaacggcctgagctcgagctgttgagcccagccgaatgaacagcccagcccagccctgctggcggcgatcgcgagcgagcgcggcgatagagcttcagccgcgcgtctcagcgtcagcaggcccgcgcagtcgtctcgtcggcctctattgcaagaagagggaaaggaggtgtcgatctgcgaagcggcaaggagggcgagcacgacggctgtggtcgtccgcaaaggagcgcgacgagctctgccgacgagctgagggcaatgagctggcaggacacgagctggcggagcacgacggccgggtcatgatcagcgggcggccaatgcgtgctgcctggcgcagcagctgagcgagcttcgcctcgaacaagagacacaagcgcgtgcagtcgccgacgggctgaccagcagcagaagccagagcatcgaccgcgttgcatgaggttgctgcagctcgaggcaggaccggtcgcgtcgcgctaggagaggagagctggtgagctcgttgctgaagctccggccgggcgggcgcacctctcgtcgccctctagacgaccgacctgacgggagagcgtcaggctgcgtgacttcaactgagcatgctcgctaggagcaggtcagccctgtggcagtttgcgtgagcgcccgagagtgtgagagtgcgagctgatgatgatgctgctggtcgtcgtcggatagtcgagctctccgggcgcgggcggaggcccctcaaccaagcgataaaaaaaggaaaagggctcctctgcccttcgccgcccgcccgccgcgccgagggtggcaagaggactgagtcgacccttcttgacccccgtccttccttaccgacgcccccttcagccaataccgcagccggagcaagcaagcacgacccaacgcacccgtccgaggagggccgcctgctcgagagccatctcgaacgacacaacagcaccccaccaccgacaccctagcacccacccaaatcgcccacccggcacccccgaccgatgcctcccgaccccagcgcggcgagctcatctggcgccgccgcgctggggtcgggaggcatcggtcgggggtgccgggtgggcgatttgggtgggtgctagggtgtcggtgcgggtcggtgtgctcgcgacaggaggctgctgctgctggcgggcgaggggcggggtgagcgtgagtgagatgggaagagagccatctgctgccctcgtcagagctttaaggccggccgtcatgccgactcggagacgaaggagctgcttctgtccggccagatggcgggcctcgaggcggacgctttccatcggtctgcatcggtcggtaatgaaggaggggaccgaccagctggaatctcgctcgacggaggtcccgtcgttgaacgtgcctcgccggacgagcgtgggctcgacgagactttctctgcgcccccttatccagcgagagcagcaggaggacaggagtgcgacgcacctgactctcttgtccgagctgaatttgaggggtagagaggaagagaaggcaggcaggcgagagtcgagggtggctggcggaggataggggcaggctcgtggcgcagagtagagcaggaaggccgagaacgccgagccgagagagagagagctttacttccgcctccagatcccaagggttgaaccccggcgaccgctcgagcaggtcaaccagcacggcgtctgctcccgtgttgcgctgccacctgtcgatgggcgtcgatgcatcggcgcgatgggcgacggtcccctggcagaggcgtcgcgcgcagagggccggccgtcggtcacacgcacgactgtcccgtcgcccgatccgcgagcaagaggaaggaaaaggtgcatggggcagccgatctagagagccaagagagagaggaggggaactatgcgcgcacaacaagcgaacagccgtcgcgagcaggggaggatacaatgggggccggcggagcgagggagaccagaacaggagagaataccgttcttagggtaggtgttgcagagctacgaccgggcgtcggccgtcgcagcgcggacagcctcctggaggtcgaggtggaagaagggcgtccggggcgagatgagggcctcaaagacgctgccctcgtcgacgagctcgacctcgtcctgccggtcgagcgagtgcttgaggttgctctcgctccggccgctcgccttctcctcgtcgctgctgctgatccggtcgtcgtcgtcgtggatggcgatgctgccctgggacgaggcgccgccggggaggacagacttgaccgtctcggtcgtgtgcggcgtgacgccgacgagctcgccctcgtgcttgcgccggccgatgccgaagccaccggcgacgagcgcgcgctggacccagggcgaggtgatggacctgaagagggggaatgggagggtgagcgacgagcgagacggaggcggaggtcgagagcaagagcgaacgcacgcaaagtggaaggtgacctcgccgtcggcgtagagctcgacttcgcgccggacgtcgacgaggttctgaacaccggtcgtgtcaaggttggcgacggccgcaaagtcgaggacgatggagcgcagtcggggccgggtgtcgaccgcctcgacctcgttattggccgccttttcgcggttcttcttgagccaccagatgggaccagggcggttccagggccggtcgcctagcttggtcaggctctcggccttgccgcgccgcgtgtgggccttgacgtaatcggtcagggcgtcgctgtagtgcgaggcgttggggaagaggaacgactcgctgaaacggtaggcgagcacgccggccggcagcggctcgaccttgacctttgactcggacccgcgggcgttgaacgggacgtagatctcgcggaccgagcggacctcgggcgacgaggagccgtcctctgtcttgacgtcgacgccgacacgaacgcggccgaggaacgagccgccggggacggcgacgcggtagagcaggagcacgacactggccgcgagcgaggtgtagactccgttctctgaaagatgtcagggagcgtgtcagcgccggccgatcgacaataatgcgacgaggagaagtgagacacgcaccgatagtcgtgaagatggtgacgaagaccgaggcgataaagatgatgcactcgaggggcgaaacccgccagaagccaaaggcgccgcggggcgagacgacgaggctgcagggtagggcagggcaggtcagcctaagtgtaccggcagagcagaggatgaaagtgacgcactcgacgacggcgccgatgatgatggccgagagcgacgcgttggggatctgaaagatgggtgcaaagcggtcaggatgaaagtcgtcggccgagcaagcgcgcgagggtgcacgacgcacgaagtagaaggcgtcggtgagggcgtagagggcgatgatgacgatgatgcccgtccaccagccggcggcgggcgtccggacgcccgacttgctcttgagggccgagcgcgagaaagagccggtcgcagggtaggcggcaaagagcgtgccgatggctgcgagcgcgggaaaagggttagcggggcatgaccgagggttgcacaggcgaactcactgttggtgacgccgatcgcgatcagctcctggttcgggttgatcttgtagttgttgagccggccaaaggacttggagatggcaatgtgctcgagcaggagaatgatggtcgcaaccgggagcttgctgcccatggccgagatgagctcgccagagatgtagggctggccgacgtgctggaagcccggcggaaccgtcttgaggatcgagatcgtgtacttcttggggtcctggtggatcgtgatgcgccaggcgatgatggtgaacaggatgatgacgagcgcgttgcgggtgaccgaggtgaagaaggcggcgcgcttgtagcgcgggtagcgcttctcgacggccgtgcacgaccacttgaagaggaagaggatcgcgagcgccgggacgcccatcgcggcgtcgagcgtgctgaacttgaggttcttgagcgtgttgatgatgaccttgtaagtcgcctcgcgagtgtcgaaccgcttcgagatgccgagcagcgacggcacctggccggcggcgatcgagatggccgagcccgtcatgaagccggcgacggctgggaccgggatgaactcgacgatgcggccgatccggagcaggccgatgccgaggacgatgaagccgcagatgaaggcgacggcagtcgcaatgacgtgggcctcccatttgcccgggtgactcgcctggacgtcatggacgatccggccaacctcgagcgacatgacggcgacgggcccgatcgagacgtcttttgacgtcgcaaagaagcagtagacaaagacaccgacaaacgacgagtagagaccgtactcgggcgcgaggccagccagcttggcgtacgacattgactgcgggacaaggacaaggccgacggtgatgccggcaatcactgcaagagaacaagagggatggcgcgtcagcccctcggaggtgcgtgagtgagtcgcaacataggaagaagggcacgcacggtcgcccgtcgcccactggaggttgtagttggggagccactgaaggaacgggaagagcgaggagacgtagtccttgacctgaagcgggaagggtcgagaaatgaaggtcagtgtgagtgactgccgcggccggtcggcaggaagcggggcgacgcacgacagtcgacggccgctgcttgtgttcggcgaaccaggcggttgtcgagacggtcgtcccgggttcgtcgacgtcgggcttgtagccgatgacccacttggcggcccgcttgagaggcgcgctcatcgcgacgggggaaggagggaaagggaacggaagagcggagggagtgacgatggccagcgggcgggcgggctgagaactgcggctgctgcttgagagagaaggagttggccgtttgcgagaagctaactttgagggataggtctactgccgtcggccgtcgatggtgtgagcagaggtgcaggtgagccgtcccttcttgcgaaatggtcagcctcttgcagtgctcccggggtcagtccaagcttccggggcgggcatcgtcccctctgtgcggtgctcgtcagcgatggcgaaatgaagacgtgcgcgagggctcggcgttctctgtgcgcggccgagcggtagaaattcgaggccctcgagcccggtccgcgcagcagacccgacgacgggagcactctcccgctcgagcaacctcgagcgataagccgcgctcttgatcagaaagacgccttgacctcgagcgctgacgccttggtcccaaatggcttgctcgagtactgcagtggcccgacctttgccgaccgtcccgccaaggaggtcgaggcatccagctcgcttccggcgacagccgtcggctggggcagccagaggtacgaatgaattcatgtgagatggcaggcaggctggttgggctcgcatgaaaggacgagcgatcagaggaggcccgagggaggccggccagcgttgctcgtacgacctcgaggacgggtcgcgatgcgagggcaataaagcagcatgtctccggctgatggcgaccgacgatgattgctcgactttgccggtcgacctgtctttggggcggacgaaaggctcgaaagacccgttcgaccgtgccgtcagatcagacgaagctttgagtcacggaccaaccgtcgacgagggccagagacgatgccgacgccctcgccacgcatcccgctcgatcggcgacctcgtctacttgtgggcccggccgcgcttgctgttcccgccaccgctagtgttcgccggcctgcctccagcagcccgcttcccgcccctcgaccctgagccccctccgagagggagagtagtcggtagtggtcgcgggagagtaaggagagcgggcgaccgatgaaaggggagggccaagggcgggcttgctgcgcgcgaaggccgggcgccaaatcgtgcgtactcgacggctgcaggggcatatgtccgagccgtgacaggatctggtacagagctccaaagtggccatcaggttcataagagaggagtgacaaagcaggcggtgcaaggggatacaaaaaggtagggacgggctggctgcaacaagagagaggtgggcgcccaggaccggcatctggcgtatgagggagggccgacgacgagccttacgtgaaagtgacaggctcgcggctctcgccgaggcggttgaggtgaacctgaagaagggaaggagaagtcagcagatgcagagcatggccgagagggagaaaggagggacggacaaagatatcggtgccgtggccctccatgctgatcagccggaggtcgccgccaaagaagcgggcatagaggcgtgagagcggaaggccgtagccaaagccagccatcggcgcgttgaagtcgttggacgcgtcgtcgagcgtggccggctccattgtcgtgtacctgcgagcggcggcggaaagcagttgtatcagcgacgcagcaggcggcaagaggaggtggcgctggagactaacatgtaggtccagatcaggggcagtgcactccgcggaagacctccgccctcgtcagagattttgatcctgaagcagaggaagcgagagaggtcagcctcgcgctcacgaaggtccagcagcagacgacgacgcacgtgatgtcctccttgccctcaacgacgattacctttatcggcgggtactcgccattgtagtcgaccccgccgcgcgactcgaccgtcgcccgaagcgagttcttgagcagctcgaaaatgatgtgggccctgtgcatgagagcgctctggtcagcaagcgaacgagagggggcgcgcaaagaaaaggcaaaagtggccgcacaggtgtccgggcacgaaggggaacgtgagctttgggtcgcagacgaggtgaacctcgggcaccttgaagagcgcgtagtggtcgccgcagacaaacttggcgttctcgatcgcctcggtgcagatctcgtggacgttctgcgggtcaggccggagaggaggtcagcttcagacgtcacacccgcaacagggaggcgcggccgacgtactgcgttcttgcagatgattccgacatagtccggatgcgggtcgagcgtattgagcgcaatgtctgaaggacaattggcgacggttagcattaagcgaagcggcgcagctcgacgttcggtgcaaaggacgaacgctggccgatgaggaagcggatgccgatacggctcatgtggaagcgatcgaggaactgctgaatcgagagaccgatccggtccgactttttgctgtgcttccactcgaggataccgcggctggtgagacaaaggaatcgtaagcgatcagcctgccggagggagcagtggtgcgcaaggacgcacgcgaccgtcatgaccgtcgggtcgtgccgcgtcttaatcttttggaggcacttggtgaacgtctcgttgtaggcgtgaacctcgggcggccaagcgacatcgcgtgtcgaggcatagtagctggagcgcagcagcagtcggtcgagccgtcagtcttcggccggcgaaggagaagagaaacggccggctcggacgtactgcttctcgaaaggcatcctatacctgccagtcgtcggctggctgagcgcaaactggccgtcgagcgaagggttgtgcgtcgcgcaaggcagcggcctacgagaggaacggaagcagaagcggacaaagtcagcgactagctccctcgtccaatgagtaacgttcgcggaaaacgcactcagctgacttttcccgcagcgcctcttggatgtcgagcgggagcttcggtggagggaagtcgacgagctcctaaaggtcggtcgggcgagaggcggggcccggaagagagacgggagcgtcatcagtagctgaaggagcagctcgcgacctcatcgcacgccctctttgcctcgctaggctcttctgcgccggccggaaggcccttgccacagaaagataagaattggacggacctcgaaactctcggcgtaccagtcccggacccgctggatcgacggcatcttgctgaggccctctggcagctcgtccaggtcctggacgcggtgcgcgagccggacaggcagctgaaggatgggacagcaaagcaaggccttcagcaaaagctcgtctgacggcttgataggcgtcttagccagcgagcccgaggaaaagagccgggacggacctcttcctgcagaaactggcttgccttgagcatcgtcccctgcgatggaacggcgccaaacttgatcatctgctgcaggctcactggaaaggcgagcgaatgagcagctcggtcagcgtctgcaatcagagagggcgtccaacaagggtgcaacatgaggccaagagccagggcagagtctgagcaaggcggaaagaggacgaggaagggggcgaggagacggaggaagcagctctcttgacgcaccggccgtcggttggaagctcgcataatgggcgatccggtcctggagcgccgacgtgatgcggtacaccatggtgttgcgggcgagaaggggtgtgggagagcagaggcagtggcaagaaggggaggggcgatggtggacgtcggaagtggggcgaggttgcgggctttgggcctagccggccggccggtgcgagctggcgcagagctcggagtcacgcctgccgggcgaacgcggacaggtcgtcgtcgggtcgtcgggccagaggcacatgtcaactaggtcgaacccggcgccctcgcttcagcccgcactactcccctctcgtacgtagggctgactgactgacggagcttcaatataaggaagctcatggctcgcgtcggctctcaggccagtagcttggcgatcgccgccgcctcctcctcagccaggccaaacgcctcggccggcccgcccgattggccctctccggccgctgaccaagccgccttgaacgccttgcgatcatcctcgagcagcgtctcgcgctcgagcaggccgacaagcacgcgcgccgccttttcgcggtagtcggcgtcggcgcttgcaggctcctcgtccgagtcggccccgggcgcagggaagcctgggaggagcgatgcggcgagcgtcgccgggagcccgtgccgggtgagcgagaggacgagagcgtgagaccgggcagaggctgcgtcggccgggacgggcaacagcaacgtcgacagcagaaaggccgtcttgcgccggatcaccagactagggtctgtccaacggcatgcgctcggtcagccctaggaccctggaagccgccagactcccgggaaagacgtacccgacaagccgcccttgatgacctcccagccccaaccgtcgccgttgttaaggagctcggtcgcgaccgggttccacttgagcgcgcccgagagggcgtacattgcccgcgagcgcgtctcggcgctcgagcgcggtatgctcgggacctcgagcgaggcgggcggggcggcgtcggtcgtcgagatcagcgcgagcagggtcggcagtgggctcagattgaggaacttaatgggcgcatcttgatcagctcgtgaggacgcaagggcggggaggggcagcctgggacgtacagcagcctgcgacttagcgttgttttggatggcggtcccgcagacccaagcggcgtgccgccggacaaggtccgacgacgacgtcagaagcgaaaagattttgggccagaggcccatgtttgccaggtcgttggcgttgtcgatgccctcgacgagctggcaaaagagggagcaaggtcagcaaaggcaaggccgtcggtgacgagcagagggcgggggggagacgacgcacgagctcgaggttgtcaagcgcgacgctgaacgaaagatgatagcagctcgtcagccagtcgctccccaagctctctgccgatcggctgaatccctttaagggcactcacacccggtcgtcctcggtcttgctttcgtcgagcgcagcctcgaccgcctcgcgcatgagcgtcgcatctggcttgcccatcaacgcctcgtacaggcccgggtcggccaggtctttccgccggccggccgcaatctcggccgcgaccttgtggagctcggccgcgttgccgtcctccggcacagagttctcgatgcccctggaaaaaagggcagcaagcaggttgtcggggtcagcggcgggggcaaggagtggccaagggaggcctggctccgacgcaccagcgaagaagcgagtccatcgtgaagctattattgagagagatagaagggaagttgtggatgctagcgtgtgggcgtgcgtgcgtgcgtgagagactgtagaagagggcgtggtcgtcgtttgatgtctgggcaggagcagctggtcgaggaggcggagccgctgcgcccgccgccgcggaaattgaataatgacggcggcggtttcgacgtgtcggttgcccaggtcgagccagcacattccaccgacgacggccgcgcaatctcaatcctttcatattcacgaggccagcatcggcacaggagagagtcggcacaggagagagaggaagggtcgacgattaaaagatgtttgataaggtacaaagccgatccctccccgcgccacccctcctctccccccactggggggggggggggtggggagcaagagtgacgcacgcttgagcaggccaaagaggacgtcggtgttgatcgaccgctcgtgcgcctcgtcgaggatgatgcaagagtaggccgacatgtcggggtcgatcaatgcctcacggagcagcagaccgtccgtcatatacttgatcttggtctcgggcccggtgcagtcttcaaagcggatcgcgtagccgacctcttcgccaagccggcaaccgacctcttcggcgacacgcttagcgaccgacgtcgcggcgacacgccgcggctgcgtgcagccaatcttgccacggtcggcgaaaccctcctcagcgaggaactgcgtcatctgcgtcgtcttgcccgagcccgtctcgccaatgacgatcaggacgttgttctgcggggcagacgggtacgtgcagatgggagatgtcagcgtgcgagcggggcgctggaagcaagcgatcgacgactcacgtccttgacggcggcgacgagctcgttgcggaacttgtagacgggcagcgagcgccgctgctcctggatcgtcttgttggtgacgatacctggcgggcgagaagggggagagaatggtcagcggccgggcgcgcaaggaaagggaacgaggcggcggcgaggacgcaccaaacgtcatgctcttgttctccttcttccactcgggctcgtccatgcccttctcgcccatcaggctgccgcgaaggtccatcgcgaactgcttgtcgccctttgcagccatcgggtcgagccagggcgcgttgaagtcgcgtgcctccgagtcggccttgtcctgggcctcctgctgccggagctcgcgccgctccttggcgtagacctcggacgcgagcgcagcccggttgagcgagccgtctggggccttgacgaccttgacgggcgacatctccatgatgccccgcttctgtccggcgaggaacggcgcttcgtcctcgcgcgtctcgatatcgacctcctcctcaatctcggccgcgccattctccatcgagagcgtgtgctcctcgtcgaggtttgggtactcggacgcgtcgacgacgcccgacgcaatcagctgcttgatctcccaccgctcggggctcgtcagccgcttggccgacgagtgcttcggctcgtcgacggcgtaaagcggcgtcgcgtttgagctcgaggcggcggcaggaggagcccgcatgcgctcctcgtcggcgaggagctcggcctcggtcttctgccggagatggggcgtcaggtcgccgcccgtccgctggtcgacgtccttcatcgagagcgaaagccgcgagccagagaccgacatgaccttgaccttgaccgcctggttcttggtcaggacgtcggcagggttgttgagccgctggccgagcgcgatcgagccaatgtggaccatgcctagtagggggcaagttggcaaggggggcgacggtcagcgatcgagggttgggtgacgctgcgcactccagctggaaggtgaaacgtaccttcgaagcggccgcgcaggccctcgagctgaacaaaggcgccaaagtccttccagccggtgaccgtcccgctgtagatcttgtagagcgctggcttctcgtcctgctgcggccggccgtggaacgcgccgtcgcgccctccgtatccaccgcctcctccgcccgctgacgaccctccaggcccggggtagcctccccggtcgcccgagccatagccgccccgctgaccgtagccattgtcgcgcggcgtcgggtccctcccgcgcgagtcgtcgtcgtcgtacctcgcgcgcttgctcggcccgggctcaagatcctcccgctggctcgtgctcatccgagccttcttcccgacgccctcgagctgcgagagcaggtcgccgacctccttgtcgagcacggctggggcgcccgctactttcgcccgaggcttgtcagcggcgtcgggctcgaacgacggcgcgtagggcgtgtcgggcagggcgagcgacgggaggagccgccgctgaagctccttctcggccgagagcttctcctgcggctgtgcctttgcagccgcctccgtgtcggccttgagggccttcttcgacttcttcttgtactttgggtggagcgagaggatgagtcggctgcggagggcaaggcaggtgcgggtgtggcggcaaggggtcagcgcgggaatcgagacgtaaggcgggaggggggacgaagaagcgatgctacattgggcgcctagcccatgagacccagcacacatcgctctctccggtctccagcaggcataggaggtagagtgacggtgaggaggtggaagggacggcgggcgagcggcactcactctagcgtctcgatgaaagcaggctcgaagccggcgccgacctcgtcgagcttggccttgaagtctgcgagcgtcttgctcttctggtggagcgagatgacaaactctgcgagcgacttgtcattgatggtcgtgtggttgaggatctcttgcgagatgcgcgagacgagcgagaggagctcgagccggtagaggtccttgtccgacatggtggcggcgggcgggacgagggccggggctgagcgcctgaggctgcgaagagggagaggaagatgcggaccgggaagactggaaactaggaacgggaagcaagaggcgtcgtcgaggtcgggatgtgggcgagcgagagagagagagagagagaggagacgacggtcgtcgggaggaagcccgcgcgactcttgccaaaagggccgggctcgcaagcaccgacggccttcgccctgacaaccatcttctcgcacctcccgtcagcatgtccctcgccgagccgcctgcacagacggcagactggtcaaacgccttctggggcctcgtcagtctcatccttcacttgtttgctggttggcaggcctcgagcgctgcgtccttctgcgcgcgcgcgcgcctgccgacgcatgcttggacatcgtcggctgaactctgggtcatcgctccttctctcgcagcacgatgagggctacgaggtcgtcctcggccgcatgcgctcgtcggccaagacggttgacgccctccagtcgttctggcacgaacggtctgtccctctcgagcttgcaagcgtcaccgaggagaggagatcaagccaggacgcgtcactcaaccctttctctcccttctcttcctccctttgacccgcccagcatcgcgatcgaagaagactatgcgcgacggctctcgaagcttggccggagccagggcgcgcttcttggcaaggacgaggagggccagctgaaggaggcgctcgagacgctcggccgggagacggatgggctcggcgagagccaccgacacctcgcgggcgagatgaaggcgacgctcgaggtgcgtccaccgagcgttctgtcactgtgacgcaagcttcgcgagcgcaagtggagctcttagcagacacttccgctcgagctttgccttgctggtcccaggcgttggcctttaagcgtctcgagctgaccctcgcccctctccctttctccccgtggcgctcgtcacaggcgccaaacgccgactttgctgcgcgcctgactgccttccgcaagaatgtcagtccctctgcctttttttcttcgccccgcgtcctctcgactgatagctttgctgtcgccgaccctccagaaccagacggcgctcgaaaaggtctacaagctcaagctcagccaggagggctacgtcaataaggtgcgcggcaagcaagctcgagcaacccttccaccccgtcgacaagtctactgacctgccttgttcccgtcaggcccgcgacaagctctcgcagcagatgctcctctccaactcgtacacggcccaatcgtccctctcgcaaggccgcgagctcgaccgggtcgcctcgaagctcgaccgggcccagggcaacgtcgccgcggccgagcgcgacctccggacgttcctcggtgcgctcggcgagacgtggggccggtgggtcgatggctggaagaccttctgcgacgaggcgcaggacctcgaggaggagcgcgtcgactttttgaaggacgtctgctgggcttacgctaatgccgtttcgagcgtctgcgtcgttgacgacgaggtcaggccgccttcctcttctttcacccccgggcctcgtcgagtgctgacgacttcgacccttgcctcggccaggcctgcgagcgcatgcgcgtctcgctcgagtcggtcgactcatttgccgaagcggccgcttttgtccgcgcccaccagacctcgggcaaaatccccgacccgccgcgcttcgtcaactatgcggccggcgaacgcgagccggacgatattgcgttccaccaggcgcggttcgtccggcggacagagaggccggcgccgacgacgccgtcggcgcctgtggcgggccaggctgccgagcaggatctggcgccgcggcagaccgaaggggaggttggagaggtgcagcgcgcgatggaagggatggacctcggccaggagcagccgccagttcaggccgcgactcctgcgcaggctactccggctcccctcgtacagcagcagtcgtatcagcagcagcagcagcagcagcaataccagccgccgcttccgtcgcaggctccggtcgcccccgctcctgcgcctcaacagccggcctaccagcagcagcatcagcaacagcagcagcagcttcctccaaagctcccgcagagcatcatgtcgcctccgccccacccgtcgcagatggaggggggagcggaggagcgggcagcaagcctggctttcccgcctttgccctctcccttctctctcgcatgtttcgaggccaaagagctgaaccctctcaacgtctttttctccctcggccgtcggctctgcagtactggaagcgtgacgtgcgtttccccctccttcttgtctggagggctcgttgggtgccggctaggccaggtcggatgggagcgttgtgcgcgattcgctccggcctctctgcgtccctccggtccctccgagatcttctctcgcgcaagagggcatgatcgaaggctcagacccagacccaaactgaccctcctcctttcggttcgctcgacgccccgcctcgcagagccggcgcgcctacccccggacgtccgtcatcacccagacggacctgacgcagctcttactcgcctcgcctgctgggcaggctgcgtgcgttccctcccttcccttcccttccctcctcccttgtgggtgaactgacgcccttccactcgtttcatgccggtcgtcgcgagcagcctcccggagccttcctcttccactcgctcgagctcgacctccctcacccagcagtcggccgaatccgacctcccgtcctactcgaccgtcctcgcccagcttcccgcctcggccgctgcgtttggcaagggcaagcttccgccgagcccgccgagcttcgggacggccctcaagcctcgggtcgccaagcgggtcggggatgcgccgtttggcgttggcgagtacatgtccgttcccccggcttctctctctctctctctctctctctctctctctctctctctctctcatctccgtctctctcctctctttctctccccctcttctcgacccttgactctcatcgaggctcgggctggagcttgcgcgcgatgacgggagagggaggacaaacggcagtcggcgtgcctcttggaggcgaaggatgccatgcgcgcgggcgtaccgagagaggcagagaggcagaattctctcttgcccgccttccctgtctgcctgacctacccgctagcctagcagcagcagccctgctcgccagactcgagccccttggctccccttttgctcaaagcggtcctcttccagtcagtcggctgacgcgactcccctcattccccccccctcccccttttctcctcgctcggcgtgcgtgggcgagcaggcacatgtacgcataggtgcaccttcgggttgcttgctggctgcaggcggctgcggtggacggttggtcggtcggtcagtcatcggtcggtcggccagtcggtcggtttgtccaagttgatcgtcggtcgtcgtttgcatgcgtgtgagggaagtatattggctcctgaaggagaaaacccgaggaagggggagaaaggtggggatttgaggaatgacattccgctggctttcctttgacgacgccgaggttcaggggccgttcggacgagtcagacctggctaggctgagttggggggtgctccgggcgggttagtcgggacgggtgggcttcagcgatgaagcgcctcgactcgactcgacccgacgcgcggggtccatcgcgcgactccttctccctgcggtccaaaggacgactctctttttgcctcctgcttgtcctcgagcgagcgagtcgacagacgtttctgctgcaagtgaagcaacaagagcggccgccaccgcctgaatgcgcatgaaatgatggggtgcacgcgccaggcgtccaggcgatggccaatcgggctgttgagggcggactcaagggctttgcacgagctcgcaagctgcgccggtccggcacttggttgaactagtctggctttcgagtattctcgcgatcgtttctcgcgacgccttggatgcttcggccgtgggacaggagagtgcagaccagaaagcgtccggaagacgctttcagggtaatccggaagagcgtcgaaagcaagggggtcgactgcgcgcgcaccgcactaggagggaagcacgcgcctggccactttgaaactccgcccttgggccgccgggctggctgcccggcaactggtcggcccggggctttaaggtctcggcagcgggagccaaccagcagcgagtcgaaggacctcctgcgttccacccatcatcttcctcctcctcctcactctctctctttcttgatcatgagcggtaacaaaggtcggtcccctcgtgctagcgagccagaatagagtgggagcgcgcgcccgtcgccgccctccatcgctcgacgccaggctcggaccatctctccctcccgctgcggctgacaccctgacccaccctaccacctgcgacttggctagtcatcatcgtcggcggcggcctcagtggtctttcggctggtgcgtctcaaaacgagcaaagcgcgagcggggtgtttgccagctggaaacgctgacactttctccttccctccttcgctcgcctctcccgcccgctcacgtgcctcccgctctcgcagcccaccagctgctcgagcgcggcgcttcggtcctcctgcttgacaagcagcccttcatgggcggcaactcgaccaaggcaacgtcaggcatcaacggcgccggtaccaactcgcaagccgagctcggcatcaaggattcagcaaagacgttctttgacgacacaaagagttcggccaaggagctcgcgcgcgacgacctgatcaaggtcctgacgggcaagtcggccgacgccgtccattggctcgaggcgacgtttgggctcgatctgagcaaggtctcgcggctcggagggcactcgcagccgaggacgcaccgaggcggcgctcagtttccgggcatggtgcgcccgctcgaggcccgctctcgagtcccttgcagtcagcttagcctcttctactctctctgctttgctcttctcccccttgcagaccatcacgtacgcccagatggaggcgcttgaggatcttgcgagctcgatcccagaccgcgtgacgatcaagaagaaggctcgggtgacgcgcctcctcaaggagggcgaggctgtcgtcggcgtcgagtacgagtacgccggcgagaagcacgaggagcgcggacctgtcattcttgcgaccggttcgtccccgacttctttcgttctatttgatgcagcgcgtgcgcgcgcgcgctgacactacgactctcaccctctcgcccgcccctcgcaggcggctacgcggccgactttaccaattcgtcgctcctcaagaagtaccggcccgacatctacgacctgccgacgaccaacggtgaccactgcacgggcgacggtcagaagcttgcgatggagattggcggggcggcgatcgacctcgagaaggtccaaggtgcgtgcgcactcgcgacctgacgtcgagggagtctttgcggaagctgacgaacgacgacgacgtctgcgtcttctcccgccagtccacccgaccggcctcgtcgacccgcgtgacccggacgccaaggttaagttcctcgctgccgaggccctccgcggcgtcggcggcctccttctcgacaacacgggcgttcgcttctgcgacgagctcggccggcgcgactatgtcacgggcgagatgaacaagaacggcaagtttccgatccggctcgtgctgaatggccaagcgagcaaggagatcgagtggcactgcaagcactatgtcggccgcgggctgatgaagcgctttgagagcggccaggcgatggctgacgagatgaaggtcaagcccgaggtcctccagaagacgtgtgagtctgcttttccgttgtcgactctagctctgacgagccagagctgaccaaacccctttgcgcgcactcgcatccagtcgacgactacaataaggtcgccgagagcaagaacgacccctacggcaagaaggtgaggggacttccttgcgggcaaaagtacgagaggatggctcttgctgacctacagcgcccactcgtcagttcttccccggcggcaagtttaagatggacgacgttttccacgtcgcccacatgacgcccgtcctgcactgtgcgttgcctcgtctcgccttgacgacgggcgccgattgctgacggcctgctgtacgcgcctgacgacagacacaatgggcggtctcgagatcgacccccaatcgcgcgtcctcggcaaggaccagaaaccgatcgtgcgtcccacttcgcatcctgccgctccaagacccccccggctgacattctccccttcgccattgcaatccagccgggactctttgcctcgggcgaagtcgccggcggcgtccacggcgcgaaccggcttggcggctcgtcgctcctcggctgcgtcgtctttggccgggtcgcggccgactcggctgcgagctacctcgtcagcagctatagctcgaagcgggccaacgaacggctgggcgcggtcgcgggccacatgatgcaggtccgtcggtgtctgctctcttacccagccccgccctggcctctctgacctgacttacacctcccatcttgtaggcgacaatcacgatcgcccccggctcgcgcatcacgatcgacacgaccggctcagcctccaactcctcccaggcctcccaggcgaaacagccttcgtctgccgcttcctcgtcagccaagccccctgcggcgccctcggcagaggcaaaggagggcatcgacccgaacgagggcgacaagctcgtcgccggctcgtcgccggctgagcgggtctcgaagaagggcgagcccgagggcaagaaacgcccttcacgctccttgcgcagaggcgagctcgctagtctatcccgcgtcgtccggcttgacgtccaggtggtgagctggtggcgctcccgtatcgaccgggactcggcacgccggccgtgttgccttcacgcaaggtcgagctccggccgctctcgcgccgaggacgacgggcagcacgccggatccggtgctggttggacgtgcgtagaggtggcgtgtagcactgagcagcgtgagagagctgcaagggctgcaacgacctgccagagaggtgcagcagtggggaggtggcgggcgaggacggctcgtcgaacagcgtgaggcgaggccggggtggggcaggaccaggagaggaggcctcggttggccgtgctggaggccttggtcgatgcaggatcggcagtcacgatcagcctcctctagaccgacagcccgagatggccttattcctgtcggtagggcgagccagtagaggaggcctggtcgttgtcaacggccaaggaagcagcttcgacgaggcctctcgagcccggacgcgacgagacggtactggcctgccctcgaacgaccagctgtctgtcgcagcaagacgcccctcgctgactcgcaaggcagcttgctctgctggaagagctgctatctggccctcggacgaccacctgtcgtctgcagtgtccaggcagaccgcttcgaagggaaggggaggcagccgacggtcggtcgctcggctcctcccgcgccgaaggaccatctgtcagtctgccctcgagcccgagcctgccgaagcccgagctgactcccgcctgcccttcttcagctcgctggcaggagcgcgacacaaagcgggtgctagatctgatcctgctgacgagggttgggttgggtcgtgtcgtacgattgctgccggcgtcccaacacgggcgcgcgtcgtccctgctcggcgtcgcaacgggcgtcatctcgcacggctctcatccactccgagacgagaaggacggggcgagtcgtcgaatatcagcgacgtctcgccggatgctcgggctgatgaggctgagctgacccaggtcgtctttgggtggtctggttctcgcccgcgcaggcacgcagacgcgcttctcggcctcacgtcgctcgaccacctgacccatccggatggtcggctcgcctgctgtttgtcacgcggcatgctcgtctgctggcgagaagaagggacactggccgtagcttcgaattgtacaacgccagccttttggactccatggtctcaacgacgccagaggggagaggaggaaacgcgacgcgcccgccggcaggcaacagataaggaacagacatgaataggtatcggagcagggagcggacacaagacaggccctgcgtcggcggcaggagtagcgtgagggggacgggatgggggggataagtcgccaggtacggccgagagcgtgagaaggacagacagacagacgcgaggggcagaagcgcgagcagaagcgggtcgttcgaggaagggggaatcgtgacaaggacgagatggaagggatggaggcagcgagcgagggccaagacgattcgtcgcccgctcggctgccgagagaaggggtgtggtctttaaaccgaccgcgagcgatagtggccggcgcgcagggcagtctgttcgacacgggcggcaagccgggcccgcttgccgcgaagggaggagggagcaaccgtcgtcgacgtcttggtcggcgagtcgggcaggctgacggcaggagatgaccaaaggtagagctgccggaggccgacgacgggggcgagtcaaaggatagcgaagatgaccgagataacgaggacgggcaggacgacgaggccgctgaggatctggagcagcgggaggagggggaggcgacaggaggttcagcacgtatgctagcggccgggcagtcaaagggagaggagaaaaagagaatgacgtacggcggcgacccggttgcggaagacccacttgttgggcgcgtcgtgtcggagtgcaggcaggatccactgcttgcgccgaatctgctgctgggcatgagcacggatccaacggcctccagccgggccaggagcagagccgaggaagcgctcgcgagcggcaacgtcgtcggcagcaacggcggggaggaccgtcgtcgagcggaaaggccagaagcccaaccgggccgagtcgaaggacgactgcctggggcctgcagtcgggccccagaagccgctgctgcccctggcctgaaggggcgaagggcgctgcgagcggcggcgggcatcgacgttgagcgagcgcgggtcggcgacgcgtgcgccttggaggcgggtgaggacgaaggagccgtccgaggcgagaccccagccgccgaggacgaagcaccctgacgagtcacaagagccgtcagtcaaggtcgcacgaaggagcgaaggcaaaaggtcaagcacgtacagggtccgaggacgaaaccgagccagaacaccatctgcgcaggcaggacgtcctcaagcaggccaagcggcgcacggacgacgcgctcgactcgctcggccacactcccccggacggcggccgccagggctgtcgcgagcccgccttcggacgcgcgtgggccggcgcgcatgcggttccggcgcgagatggatgaccggctgcggaggtggtggctgctgccgtttcgcgggaggtcggccggccggctgaacgagatagatgaggatgagccggccgaccgggccatgctgctcgcctcggcagctgcgacagaggacgaggtcgagtcgatcgagaccgtccgccggggccgttgagcgccaggtaggcggagcgccgtcggcccggcaccggccaagcgcagtcgggccatcagcacgtcgtcctcttccggtgttgtcgctcggggcgtcgacggctggacgacgattgcgacgttggtctttgaggaaaggcgcgggggcgaccgccaaggcccgtcgagccgagcacggcgcgttgggtcgagcgacgcgcgcgagagaaggacgggcgcgaacgccggcggggggcgaggagcgtcgctcgagcgacgggtcgcgttgtcgcgggcggacgtcggccatgttgcgtctgctggcgtcgtcgaggtcggccgaccgaaggtgacagccgtaggaggcggggtgagtgcacctaagctaccgatattgctgtcagcaggcgacttgagggaaagctgctgcgagaggggggagtcgagcgaatgtcagaaacctcggcttccaatccagttcgggagagacggaaagcagcgcacctgctgtccggcgaaggagctctgatgctccgggctcggcggccgccagaagagctcgcgctcgacgtcccttgggtcgacatccgagagccgccacgcctgccggtgcgcctggctcgagccgaccgtgctggcagagttggagccggacagcgtaggcctgttgcccaccaccgccaaaggttgtgaaggcgggccggccgggggcggcgaaaagcggtagctgatgctgcttgggccgcgccggtggtcgttcgaccggacgcggacgagcccaggctgcgcaacagaccgtccgtcctggccgaccttgctcgtcagggcatgagcagcggcgggcgctgtcgggtacgccgtcgagggaccgaagcggggctccgccaggtgttcgggcgtcgtgtagagcgacgacgggttaggcgacggctcctctccgccgcgtgcgctcaagaagaggtcgtccgcaggcgaggacgctcggctcgagccggcgctgctgctgccggcgataggaggaagagcggtccccgccgtcgtccggggctcgacagcgaacgacgagcggtccatcgtcgtcgtcgtcatcgtgagcgccgctgaccgttctgggccggctcgaacggcgacgaggacggcaggcaccgcagctcggggcggcgcggcgtccgctggtgaccggggcgggtcgaaagcaaagtcgaggtcggcctcggacgacatgtcggcgctcgaccggccgccgagcgaagcgacttcgccatcaaccagggcgctgccgacccagcgcgacgggccaccgcacgagttgcacgagccgtggccgctgccgctcccgccggccgaggggctgtcgtccgacgcgctagcgaagctcgcaaacggtcccttgacgttagaaggagcctggtcggccgctgttgaaggctgggtgagagtcggtcggccggtggaagcgagcgacacagcctgaacgggcggcgacggagggggcgaaagcagcggcattggacgtgtcgctgtggctgtctctgcgaccgccagcacgaccgctgtcgtcgtcgacgctccccgacggtggaggtgcgggaactcgcgctcgtgctgaaagaggaagagctctttgcgaaagaggacgcgcggggcgataggcgcagcagcggggtcgagcggcaggtaggggttgccatgtgcggaagcgtgcgggagggtgttcaaggccggccggtcggcctcgagcccgtgctcgccgaaggaaagaggaccgtcaaccggtggccgaccagagagctcgctcgccgccgccgtcgctgcgcccgccgagacggacgcggctgctgacgccggcgggaacgaggggctcggcggcaggcccctcttcatccgccgccgctcgaggtcgctctcgctctcgtcggcgtccgtgggaaggggcgggtggtcgcttgcctgccgccgagcccctcgctccaacctctcccccagccgccctacaccctccatccgctccgttcctgtcgatagctcggccgacagcaaaactttcccaccggtagcctgccagcagacttagctcggtcagtcgagatggccgttccctcctgcgaaacttcccctcgccggcgcagccaacctctcccacccacaacctcgcgacggccactgctgttcgcacgctcactcgcccacccgaccgctctcttcgtagtgagatcaagaggatcatgccagtcattacttcttacccttcttagcgccgccgaccgacgtccggcccttcttgccggccttcttgtcggcgccgccctcagccgccttgcgcttcttatcgccgaccggtgcagatgactcggcgaccggcgccttgacgctgacgaccgacgaaagattgcggctagtggcgttgccggcgtcctttgcagcggcgagcgctgcgacctgagcttgagcagcggcccagtctccggccgagtcgtcaatcgcgtacctggcaggaccacgagaaggagctcccggtgccaatgagcgttcggaacaagcggatcgccataggggaaaggaagggcgcactcactggtcaaggtcgagcgagtcaatcatcgcccgcttcatctcgcgcatcttgcgcgtcgcctcgtcgccggcctgctcgagctcagcctcgagcgtgccctccatcggcttccagtccttcgtcgcgcccgcgagcccctgcttgcggacgacgtcggcctgcgtccgctcggccgggagctcatccgcgatcgccttcttctggacagcctggagcgcggctgagagcttcctaatggccttgataaagagcgcgagggcctggttgaccggcaggccgagctcgagtgcgacgtcctcgatcgacttgcgctggaggccgagcccgaggaggatcgaggcctggacgggcgacaggctgaggtcggccgcgagccgccggtcgaaaaagtaggcggcgaccgtcgggagcaggtcgagaatgacgtggtagtccagcgtattgtgcgcgtacgactcgagccgcttcaggtcaaacggcgtgacgaggtaagagagttcggtcatggagaggactttggaagaagggggaaacgagcgtcagctaatggagggccaagctgcgaaagtgctggagacgcacgacgcgactcgtcccgcttagcgccggcggtggcagcgtcgatgatgctgagcgaggtcgccgacgtaaactcgcggaacttgtaagacagcagcgcgaggaagcgcttgcggaagtctggttcggcatcgaggatctcgtcgtgcatcagtgaacagttgcaaggggcgacgtgagagagcgagccacgacgcaccggttgcaaacgcctcgagccagccttcctcctcctttgcgactccaccaagcgccttgagcatgacgcacgagtgctcgcccgtcaaatcgttcgccgtctggcggaggtagagcggcacaaagcccgagcgcttccagaagcggagcagctggggcgtcaggccgtacgagacgccgatgtagtcgagcaccggcggccggcgctccgagagacgctggagaaggggcggcattgccccggccggccggacggtgagcgactcggagtggagcgcatcgtcgacgccgtcagcctcgtcgtcgacgatggtcgcctcagcgtcgtcgtccggggtccgttccggcaggtcgtcgaggttcgacagctcgcccgagtagaaggcgtcgagctcctgaagcgccctcgcgccataacccatgtttgcgtagtccgggtgcgtcgcgatccggacgacgcgcgcgcccgaaagcatcgcaaagtcgtcgtcctggaactgctgggccatcagccacgggatgaggtcgccgcctgcgcgctcgccccttgcgagcgcctcgagaatgacgtcctttgaaatgcggccctccatcgcgacctggaggacgacaagcggctcgggtagcgtgttgtcgtcggctgcgatcggtgggagcaggacaaagagctcgtgggcgggcgcgtccgacatgagctgaaggtcgttgggcgagttcttgtagtgggacgagacgtagagggccatcatccgctggaggaagagctccgaggccgggtggaacgagaagagagtgtcgcgcgagacgtggtagaggttgcattgggccgggtgcgggcagcccgagacgtttcgcgagacgagcgaggcgtcgaggcagaggagcgtgttgagccagcgctcgaccgggtcgccgaccgcgtaccggatgggctcgtcgagcttgatctcgcgcaggctccggccgaccgtcgcctttgagttgccctcgggcttcttcttgtcgccctcggccggcttagccgcgtcgtcctttgcgccctggagcgccggggtcgcagaagcccgcgtcgactcgcgcagctgctggatgagcttgatcgagagcgaccggccggtgccctcgtagccgttgattgtcgatgccataaagacgaggtaggggccgatcagctgccggacgagcggaagcgggatcgccgccgcctcgtcaatgatgacgagctcggcctggccaaggacgtgcgcgtcttgcggttgaatgtactgcggcggcgggagccagaagggttcagtaccgagcggagagaatgcaggatggcaaaagcggcgacacacctggatcgtctgccgatggcccttatggacgttgacgcggacgacgcagcccttccactctgccttcgtgctctggaggatatcgtaatcctggtgctcctcgtagccgagtgcgtccagacccttgaaaacgaactcaaagagcgtcttgaggttctcgggcgagggcgacgtcacaaagatgtttgagtagccgtgcgcgagcgaggcggcgatcgagaggccgagggcggccgactttccacggccgcggccggcggtgagcgtgacggtcgatgagagcgtctttgctgtaatggcctcggtgaacgagagaatggccttggcctgcgagagggaggaaagcggctcagcaatctgctcaaaaaggcgttctcgaaggagggcggtggcttagagcgtctcgcacctgatcgaccgtctttgcgagcccgacgagctcgccgacaatctttgcaccggcgacctcgtccctgactcgcattagttcaccctgcgctttctccttgcccttttgactcgcgacgaggctcccagggacgatatccttgccggccgagacgggtaaaacgttaagctcgtcgtcgaggaagagggacgacggcgaggccgagagcgagaggagaaagcgctcgttgaagcgcggcttgagcgaactgtgcgagtcggtccggtagcgggcgtggacgtcctgcatgtagaggtcggcgtcagtcggctgcctacctgaaggggagcggccaatcgcccggactgaccatcgacatgtcgtagagctgcttgagcgagctcatcgtccggaggaggagaacgacgattccgccgccctcgaccgtctccactgtcctcgcgagcaagttcggcgtgatggcctcaaagtcctggaggacgagcatgccaaacgtctggccgaggaccttgtcggtgtccttgtagtacgtgtagcggatgtcggtcacgctgacaaacagctcaaacggggactgctcgttgacctcgcgaatgccacgcttgacgtcgcgcttgagcttggcctcgcgcttcttccggtgcgaggtaaagccgaggtccttcttgtagcaccagaggacgctcggccgggcgctgacgcgcgtctgcgagaggaggaagtggaggttgacaacctggtccttgccccggtcgccgacgaggacaaagaaggaccggtggttggccgagacgcccgaggtgatgagcgacgggatccgggggtcgagttgcttcctcatggcgggcgggcagttctggatgagagaggtggtgagggagcgagtgtcgctgcgcgaagggcgggccagattctgcagaggggcgggtgtttacgccgggcgtgtaagacgggcgtacgtaactgcagcgcgtaactgcccggccccctactctctctccctctcttgcccttaccctcgtccctctcgctcctctcgccatggcctcggccggtccgtcttctcactctttgcccgctcagctggggcgtttactgacgtcactcgtttccctcagcaatcgacctatacagcctcctcggccgagcgcccgacgacgcccatgtcgcgttgaccgtcgacgccatcgcccggcgcaccgccgccttccgctcgccgacgtcaaccaagcaggagcagcagcaagaggtcgagcggctgctgacgagcgaacgcaagtcgttctgtgcgttcctttgctcgctttcagtagatcgaggtccatgccgtcgctcggccgtcgaccgcgacctccgtcttcgaactgcgcgcggcccgccggctaactgccacccctcccgaccagccgacgcaacgtacaacctctaccctcacctcgggctctcactttccttccacccgaaggagcggacgatcaaccaaattgacttgacgtcgcccgttcctgctcttctttcctctgttgcgggctcccttacgacaacaggcccttcgccctcctcaccgacccccggtgctccacaccccctccctcccttcgccctctccgaatcgtggtagatgacgtcgatgtgtttcgtgcgcgggtggtgcagcgggttacgcgcgagcgcgtttgccccttgattgtcgccgtaaagctcgagcacctcatcgtcctggctggcgccgccaactgggatcgggccgtccatcctgatgccgagctccttaagaggcctttgaaccatgacgcctccttgcctgtctctccgagcgccatgtaatcggcctcggtgctggagcgagcgatggtggcctgcttacgagactgccaggagaccgggccgccgccgagcgtaaagacgtaacccgtgaccgagctccggttgcccacgtcgtttgcccagtcggcgtccgagaagccctgaagacctttacctccctcgtacaccagcctcacagccggcgcaccccgtaagtaccttagtacttccttcagggcggccatgtgcgccgctccaggaagggcctggaagcgggagagatagttaacggcctcggtgatgtccggcctcgtcatgaccgacaggtagttgacggagcccaacagggactggtaagtcgtcacttcggccagtggaagtcggtcgggcgaggcggcgtcgagggcgggcaagctggtcttggccgggagtggcaccttgtttggcttggactctgacatgccccatcgttcgagcagctccttgaccttgtgctcctagccgacctcgatccgccgccgggcccggtctcgctcgaccttcaagccgatcatgtgcgtgagctcaccgaggtccgtcatcttgtagaccgccgagagctgggctttgaagcgccgcagggcggcgaggttcgagaaggcgagcgtgaggtcgtccccatacacccccaccagcgctagcccgtccgccccgtttcggtggtagagtgagtggtcgaaggctgaccgctttaacccgaacccctgcagagtcttgtccattgccgaccaccaggtgcgtcctgcctgcttcaggccgtagaggttgcccgtcaggcgggcgacgtcgtcttctcggcctggcaccgcaaacccctttggctgagcgatgtagacctcctcttccatctgaccgtgcaggaaggcggccgtgacgtccatgctgtgtagctcgaggtcccaggcggccgagagagcgagcaggacgcgctcgctcgtgcccttgacgaccggtgcataggtctcgccgtactcccaaggctgctgggtgaagccctgggccacaagcctcgccttgtacttgtcgactgacccgtctaggttgcgcttgaccttgtgaacccacttcgacccgacgaccttggcgcctggcggacgctcggccagctcaaaggtgcgtgcttcctttagcgcccgcatctccttctccattgcctccctccagcactctgcctggggcgaccttatggcctcagcgtaggtccgaggttcggtctccggcggcggaggtggcggcgacgggaacggcagggcaggcaacgacgtcgccgagtgagcggcctacggttgcatcagcctcgcaggtagtctgcgctctcgtgctgggttccagcgtgccggtgggcgtgtctggccgatgaggtcagccatctgtatcgaggctgaagtcgtactcgtttgagggattgcaggtcggctggttttggcggggcgtttcgacctcgtcggcccttccgcccaaccatcaccctctcccgcagcgtccgaccccgccaggctctcgacctcactatcctcagcgctctccgtctcatcctccgagatgaagactgaatggcccttctgagtgcccgcaggcaccccttcgcccgcgcgggcgtcaccctaggctccaaggagcacccgggcagcgtcgaccatgccacccgtctccggccgtcgtgcgtcggtctcctcgcctgtcatctcgtccgcagactcgactgaaggcagctctgcgacgccttcttgcgcatcagcaggctctaggacgagcagctcgccatcgtacggctccccaggcgcgtcgtggtccggtgcgtcgtccgtttcctttcggctcgtcggctcgcctgcggcctcgctcgggctgagaccgccactagactcgactgacggctgctccgctctcacagcaggctccaggacgatatcgtggtggcctccattcggtgcgtcgtctgcttcgtcgccgcctcggccggccgcctcgttgtcgctcggctggccatcctcggcggctcctgagcgatgtttccgggggagcttcgccaaccccctacaactttgcccatcgccgcctgcgccggctggctccttcgcagcacatccagggtgctcgagactcgggcggagcctttgtcgccctgcgggcgggccgaggtcgacgtcgatcgttggtcgagctgcgtccgcacgaggaccttcgctgacgctcaggtccccctctctcacctccgcagcttgtccttctgcagcagctcgatcttgtccccctctcgacgtcggcatggcctcgtcgaacaccatgtcgcgtgctaggaggaccgtccgagccgccggatcgtacaggcgctaggctcgtgcgtccgctgcgtacccgaggaggagacaccgtcgcctgacgtcgtccagcttcgtccgcttctccggcgggacccaagcataggccacgcaaccgaacggccgcaggtggccgaccgacggtgtctggccaaaccacttctcgtgaggcgacgtgcccccgagggctcgatgcggtaccctagccaagacgtatatcgcgttcatcactgcctcgccccataagctgttaggcagggctgacgccttcagcatgcagcgtacggcttccatcagcgtccaattgaatcgctcggccacgccattcgactgcggcgagtacgggaccgtcaagcgtcgctggatgccggtctccttcaagtacgtctggaaggccgtgctcgtgtactcgccaccgttgtctgactgcagtgccttgaccgatcgtccagattgcttctctgccgatgtccgaaacgccttgaacgcctcaaacgtctctgacttctcgcgtacgaggtacgtccacgccttccggctgtagtcgtcgatgaaggtgacgatgtaccgcttccctgacctcgtctcatgcctgacaggcccaactacgtcgctgtgtaaaagctcgagtgggtacttggacttgcggtcggagctcgggaagggcgaccgatgcagcttgccgagctgacacgcctcgcagacacctccgcaggccgtcgtactcgtcaagtgcacgtcctttgcagcgcccgtcgccattttcctcacggcatccaagctgagatggttcagcctgcgatgccatgtctcgagaggcgcggcgacggccgcgaaggcaacgtgcaggggggccgggacggcctttgcgtcgaacagaatcgaggggccgcggtgcgaggccgtcatgatggtgcgtccgtccttttcgatcatcgcgccgtcgctcgtcagaacgcagcgtgcccctggtcgtcgagtcaagaccgagactgacacgaggttcgttgtgacatctggcgtgaacagagctcgtggcagctgccgtcggctcgtcttgccgtcgacggtcacgtcgagcacgagcgttccgtgtccatgtgcgtagatcgaagaacctttatttgccgtcacgaggggctggggggtcttgaagggcgtgtagtcccagagcatgctcttctgccgcacgagatgctccgatgcgcccgagtcgaggatgaaggcgctgacgtctgaagatgtgcctgcttgataaacgtgcagacccatgtcatagtccacgccctcgtcgaatgtcaccacgccggtcgcgagctgagtcgtgccgtggccgccgtcctgacgggccggggaagcgggcgtcgcgcgcgtgcgctcgtcgcagcgtccgaagtggcgcttgccggcgcacttccagcactgctcccaggtaaagccggccggggggtcgcggcgcttctcgcgcctgcctgccgagccgcggccagggtcgttcgtggtctgccggtggacgtccatggcggcgagctggccggtgaccgtcgtgacgcgcttctgccgctcggcttcggccaggtagcgattggcgaccacggtcggcgtgacttgggccggcgggaggttgtcgaccgcgttggtcagggccttccaggcctcgtcgccgacgtgctcgatcgaaccctgcaggatggcgacgtgcaggttgggcgagatggtctcgccgatggccttgagttcggcgatgcgtccgcggatcgtattgatgtgctgcttcatcggggtgacctggtcccagcgcgtggcggtgagctgccgaaggagcgagtgcaggttgctgctcgacttgggctcgtacacgtccaggagagacgtccatgcggcggaggcagtcttgtggtcgaagacgtggaacgtcaggtcgttgccgagcgcctgcatcagaacgtggcgagctcggacgttgctcttgcgccatttgtcgagctgagcgccgggctccgcgggctcaacctcgtcgccctcaacgagggcgaggacgcccgcatcctcgaggtgcatgaggatgcggagcttccattgctggaagacgtcgtcccgtccgttgaagacgggaatcttaaaggtggtcgaggttggggcggaggtgccataggtcggttcatcgccgacgggcatcgcgagcttgactgaggtacgttcgccccccctagtctagcacccctttagcctaggcagtagctcaccctcactgtagtcggccctgctttctgtctcgtcctacaggtgggatccatgagtcgttcacggagtattcctgagactgattcggccctgcctcctgtcttgtcctacagccgggtctagactcggccggtggcgaccgggtgtggccctgcaggttccacgtgaaagttgtgacccggtgacgggtggggaactggtagtgtttgacttctcttctgccgtgcgggctgacgccctgggttcgaaccgcgagccggggatctgctgttcctggcagggtcgaaccatgacatcagtgcgggggccagcgacttgccgttgtgcggttttgagtaagagacaaagacgggtcgtcggcaaggctggccagcttaatggtcagaatccgttagcaatgggcgggtcggagagagacaagctccggtccggagagactttgtacaaaccttcgtccttgaaaacggcgaacgtcttgtatgagtatttgggcttgcgtcttgtctgagtatttgagcttggccgcaccttcgaatacgtttccgtcgccgccgctggtatggccgtcttgccggcggattcagccgtaaagcttgatcacctcgcactcggcgagggcgacggcgatgaccttggccacgtcccgagcgtcctgcaaaacgcgaccgtccttgtcgaagctcccgtcgatcagtcgcagcacctttgccggaccttgtccgtcgcatcgtcccacgcggttggcgcaggccggaggttggcccctgtgacctcgagccacactcgctcttgatgccgtgctgaaagaacaatcgctccgacagcctgcccgacctcggaacccgcagccagggcgcgctgcgtggcgaagagtgccatcattcggtcccagtgaccggcaaagaaggaaacaatggcgcccgtgcggagggagataaacatctatgcatgacttggaaatgaggcccgctagtgagtgggcgtcagggcgaagagcgaggtggctggctttcgcacgcccgccgctcgcctgcacactgcgcggtcacgtcctgtcgccatgacgacgggcagccctggtgccctttacgtctgtcgcattctgaaagcttctcttgccttgagctggccacagcgatgttctcttcatatgaatctgagattgtcagcctttgatgcctcgcggtgtgatgaagccgtcggccggagaaggtgcaggtcggcgtcgtcgggggcagctcgaatcaaggaccggactaccctcaaccactctagctttctctctccctctcagatgctgatcaggtccagcggagcacagcgcgctcaggatccacgttcaagtggatgcggcgtggcgcgcatccaagctcatgcctcccgggctgtgagtgcgggctacgagctgacgagctcctccgcctgcagcctgccttcgacctgcccgtctccgaccgtcgtccgctcagggtgcgacctctgctctcgcgcgtagcccgagagtcttatctcttgcggtctcgctgacggcagggtcaccatctggtcagccgagaccggtgagctgaggcagcctttccagagctgaagcgcccgccgccgcagctcaagggctggtcgcgactgatggtccgctgatcaacctcatttagcaagagacaggctccgcccgggccacctccagcacgtcgcaggcagagggggagggggaggcttcatgagcagagatgtgccgcacccaagaagctacaacggagcttcgactcttcggcatgaagctcgggatcagctggcgcgggctcatcgcccttctggtcgactgggtgttagcggcaccctgctgatggtctcgccaggcctgtcttcgattagtgttggtcggtccttctcccggttcatgcctccaaattatctttcgagggcatcgcagcaggcaacggtacctactggctcgcgcaaaccccgacgccctcgagtcctcgccggccctttacgacggcatggatcgcaagcgaagtttacttttgctcgcgcgccgcgacgcgacccttgagcgcatccaagagcttctcctcgttgacgacgcctgtgcgggcagccttgagcgagtctgatgtcggagaaaaggaaatggggtgggtcagccgcgctgcagggccccacaacccctggaggaacgggccaactcacctgcgagaaggaaagcgacgtcgaggccctgctcggcgttgagccgagggtcgcagtggctctgcaagaggtcggaaatgaagcatcagtcaagtgcccgcttgcaggagcgtctgaagtgccaacgaaggcggacctggtagttcgtcgagagatccttgtcttcgaggcccatgctgccgccggtacactcggtgaccgagaagccgtcggcgttgacctcgcccgtcagctcaaggtggacgccgccgaggatcgaaccgcactcagcgtgctgaaggaacagaaagagcccgtcaacgtcgcgtcacatcgagaggttagccgagccgagcaacgcacgattcgcatcgaggccgtaacctcgtgaatgatgtcgccaaaggcgcgcgtcttgagcgtcgagttctcggccgtcttggtgttgccgtgcatcgggtcgcagacccagacgacgcgatgaccggaagcctcgacctcatcaatgtggttagcgaggaaatcctcaatcttgccggcgccatagcggcagatgagcgagaccttgcccggctcgcgattggggtcgagaactgcacacagcgcacgagggtcagcgatggagggggtttttgcctgcaagagcaagagatgacagtcggacgcactggccagcagacgggtgagctcgcccttgggcattgtcggcccgaccttgacgccgaccgggttttcgagcccgcggaagtactcgacgtgaccgccctcgacctggcgggtccggtcgccgatccagaggtagtgactgccggtattgtagtaggcgcacggcgggggcgcagggggcgtgccgttgagcgagctgaccgacgaggtcaggctctggccgcgacggccggcccgggttgagctccgctctgggttgatgctgtgacccttgttaagccgggccgaacgctcttcgtcggtctcgggccggggcaggtgccgcgtctgcgtctcctcaaactcgagcgagaggccctcgtgcgaggtaaagatttcgacgccctgggctgtcgagggcaagggcgctccgatcgtcgtcataaagtcgagcgagtcggtcaggcgcgagatgacgtcctcgaactgggcctgaaggaccggcgatcggacgtgcgagaacgaccaggaccggggcgccgtcagcgacgcaaagtcggacgcgagcagcgcccggatgtagttgagcgtcgtcgccgagtggaagtaagccgacagcagccgctcggggtcgggcgtccgctccgaagggtggtagccgttgatgttgtcgccgctgaaagaggggaagggaggccaggcgtgagcatcacatctgctatcgcccgggctagcgctcgaaggggagggaagacgcaccggaagctgaggaccttgccatgaccctcgacagtctcgtacgcgctcgaccggggcttggcgtactggccagctatccgcatgatgcgaacgacaggcagccggccaccccagacgacgatcagactcatcagcaggatgagcgacagcttatgctcaactgggtcctaggtcagagagaagggaagggggaaatcgtcagctctgacgagagagggcgggggctgggggagcaagctgccgacgctcgacgcaccgtctggcacgcatcaaagagctcggcacagtcgcctccttggagcaggaaggcctccccgagggcaacctgcgagaggtgcgtccgaagccgcgagatctcggtcggcgtgacgagcggaggcagccggcggagcttcgagaggacgctgcaaagggaagcgaccggagagcccgacgatcagctgagagcagagatcaccagtcttgagctcggcgaacctttcgagagcagcctcatcggggtatgtgacgtcctgaagcgagagcgagcatgggccgagcaggtcagcagaagctcagtctcggagggaggctggtgggcttgtcgaaaaggggtcgtccgcacctgagcgacttgcttggacctccaggacgaaggcgaccaatcggcagacgattcggacattgctaggctgtagagtagattgagagaaggtgtgacggtatagcagggcggtcgacgtcggcggggagcggcaacgagcgagtcaagccggcggcttcggaaagtcttaaaaaggccgacgaggacgcctcagcaacgaagagtccttgtcatccacatcagtcgcccttccactccttgagacctagcccctgaccgacgtcggccatgccgacaccgacgccctccatctcgtcgccctcgccctcgtcgagcacaagctcggccgcccagacgagaaggaagagcgaggtcgtgatccagcgccagtatgactgagtcggcgacgacgacggcagcagcagcaggtgcgtgtaaacggccgtcaggatcgcccgccggtacgtcaggatgacggttgtaatgcgcgcggactgccaagggggcgcgggggggggccccgcaagttcgccctccttggcgcttccaattcctcgcaggtgcccctccccctcctagcaagtcgaccgagcaaacgccagaggaggagagacgaaccgagccccgaccgcggcgcgacgcggccgtatgtcccgagcggaatgctcatgctcaggccggtcccgacgagcgcttggccgcgggcggggattgacttggcttcagacctgagaggaagggcaggcgtttggcgcaaagacagacgtcggcatcagctatgttggattggacggaggcggtggccagggtgacgagggacggacgagtagaggtcgaggccggcggcatagggcgagccgcgcgttgggagcgtcgcctcggccgtcaggcgtcggatgaggagtttgctcgaaggtggcgaagcgggcatcgttgtcggctggtcggtctttgctttcttgctcggcgggggttgggtcgacggcatgaggatgggagggagcgaaggagaggcgcgtcggctctgctgctgctgctcgacgcgacggtcccctgccgaaatgcatcgaaagcgatgcacctcatcagggccatttccgactcttttgccccgagccctccgacgaacccttgtccttgcctttacacgacaagcagcacctcctcccaacatggccgactttaccctccctcccgtgattgacaacgacgacggctcgtggggcccgacgaccgtcctcctgcccggcgccttcaaggagtcggtccttcctcctttgggccgtttgcgccgcgcctcgagctgaccactctcttgctctccccggttggctcgcagcatcccctacgcccacttcaacaaggccgacaagattgaccggatcgcagagtggtacgacgccccggcctcgacctctgcatcgggcgccgtctcgcgcgcgcccgtcctgcgctccaacgcccagcgcaggaccgacgcctcgtcgacggccgccaacaacgcctttggcttcgtccatgccgcccaggacgagaagtcgttctcgctcgtcgactcaaagtcgacggccggcctcaagccccggagcggcggcgggctcggcatcggccggatcggcggcaaccgcggtggaggccggggaggtgcgcgcggcggcggagcagccggcgccggcggtcggggaggctacggggcgcaggccggtggccggggcggtgctcaggctggcggtcgcggaggctacaacaacaacggccggggcggaggcggaaaccggttcggcggccgctggaacgacaagcctctgcgcgagtcgtcaatcgcgatcgaccctgagtggccggtgctcgaagaggtcgaattctcgcgcctcgcaaagacgtcgctcgcggttgacgagcccgagaccgtctcgtccttcggcaccgtctttgcctactcgaaggcgtttgaccggctcgcggcccggacggccgtcccactccagacgctcgaccgcgcgcgcttcaacccgacggcgtcggacgacccggtcctccgccagctggccgacgacgaccaggcagaggtcttcgcgaccgacgatgtcctcgccgttctcatgtgtgcgacgcggagcgccgcgagctgggacattgtcgtcagccgcgagggcaacaaggtcttcctcgacaagcgcgagggcggcgtctttggtgcgcccccccccccccttcatctcgtcggttgtttggctagcgctcactgactcccttcatcgcttgcttacagactacgtctcggtcaacgagaactcgcaggacccgccggccgagacgaacgaggcggagccgttcaacacggccggcgccctctcactcgaggcctcgtttgtcaatgccaactttgccgcccaggccgtcctcgagggcgaggcctctggcaagaagaaggaccggacggccctcggcggggccaaccccttctacgaggcggccgagtcgaccgacccgctcgcgtcgtgcggcttcaggtaccgcaagtttgacattacgacggcgtcggatggcgagggaaccgtctctgtcctcgtccggaccgaggtcgacgccgtcatcaagcccgagaagggcgcgccctcgaccgcccaggaccagctcgtgagcgtcaagacgctcctgaacgggcccgtcggctcgaccgggctccccgcggtcgactggcagaagaagctcgacgccggtcgtggtgcggtcgcggcgatggagatgaagaacaacagcgcaaagctcggccggtgggcactccagtcgatcctcgccggcgccgacctcatcaagatggggtgcgtcttcagactctttggccctctctcgccccgccattgacgctccttcctcccgtttaccccactcgcagctacgttgcccggtcatcgcccaaggacaagacgcggcacgtcatcctcggcacccagtcgtacaagcccaaggagttcgccgctcagatgaacctctcggttgccaacggctggggcatcgtccggactgtcgtcgacctctgcctccgccagcccgagggccggtacatcctcgtcaaggacccgaacaaggtgcgccccttccactcgtagcggtgcccccttgctaggcgctagtcgctgacctacctttcgttttccttgcgcagccgatgctccgcctctactcgatccccgaggacacattccgcggcaacgacgaggacgagctcgacgaggagctcgagggcgacgacgagtaatcccttgatctgttagagacagtgcgcggggttccttatgtacgcatgaggccctctgtcgacgagcgtctgggaatcgttggggaagagtcgttgtggtcgctgacgagagtcgtgcgtcggagcggacgagtcggcgcgtactgaccttggacgagcgcgcgaaactccgccccgccctgccgatgaccatctcgcctcatctctcaccaacactccccttcctgacctgaagcatgacccagtattcatccgtcgtcgtcctcggcgtccgtccctcagcagctgcgtccgcctcctgttcaacagcgctgacagccgcccgcccgcctacaggctagcggcgcgctcgcccatctcctcctcgctcagcttctcgcccactcctcgagcccgctcgtctcagccatcacgcgctccgacccttctacgcccttcccctcaggcgtccgcgtgatccggtccgacctgacggacgcatcactgaagctcgcgttccacggacacgacgtcgccatctcgtttgtcccctcgcgtgcggccgaagacgagaagcggtacatcgaccttgcggtcgaagcgggcgtcaagcgctgggtcgtctcgcactgtccgtcctgagcgcgcggtctgccgttgaacgggtgcacgctccgctgcgcagctcttggctgactgatcgcctgcgaacggcgcgcagacggcctcgacctgaccaaccccaagctgctcgacgtcgcctggccgctccgcgtcaagaccgacgtcattaatcaccttcgtaccaagtcgagccgcgggctgacgtggtcgtcgctggtcgtcggcccgtggttcgactggtgcgctctgcgtgcggcgcatcgtactcatgtatgcgtgctgacggcggtcgcccctccccttcgcttccctcgctataaaggggcctgaagaacggtgtcctcggcttcgacctctccaaccggcgcgtcaagctatacgacggcggtcagacgcccgtctcaatgacgacgatgcggacgaccgcgcgcacgatcgccgagtcggtcctcggccagcacgcggagtcgacggcggaccggtacgtcttcgtccggtcgtttgacgtctcgcagcgcgagattgccgaggagctcggccggcaggcgggcggagactggatcgtcgaagtcgacgagacggccgagctcgagcgggcggcgtcggcggcccgtgagaagggtgaggtctcctcccctcccatcaagccactcttcatctgacccgtgctcccgttaccaggcgccaccccgctctcgctctgccagttcgaccccgacgccgtcctcggcacgctcctcgccgctgccttccgcccaggctgcggcggtgactttggcctacataggccgctcgacaacgacctgcttggtctgccgcacgagacactggatgaggctgttggagcggtgctgcacgacgtcttggctggtaaggcctgatcgttatgcagctcgaggcccgccctcaacgtcagcttgtcggcgaaagaacgtctccgtcactcacccgcctacccctgagcggcttaccaatcaaccacttgcccttgatttcccgtctcgatgacatgccgcctttcttttcaagtcctcctgccacggagaccgccttgcgacggggcaggtaggtccatcaggagcagatcgacgggctgctgcgcggtgtcgaccgcctgccggcgccgcggcgtcagccgcttcggagggccgccctttgctatcgaggcgagcaccaaccgggttgaacaaacgaaaagcgatgcgcttgatgtcagctgaattgagccccggtctgacagaagcttcctaagcgaacggcgttgagcgagccgggtcattaggtttggctggcgaacttaacttcatgccgccggcaaaggcccgacgtcgctccctcccgaccaccatctcgcccacaagctccccccccctcccaaccccaagcggaacccgcacaaggtcgtcttttcccgtgacgtcgtcttcgacgagggctggacaatgcgcacgaagggtagcgccagcagtgggagcggccagacggccacgatgacgccgttgactagccgaatgccgctcggccttgaccttccctcgtctccgtcgggtccggcggagattgaggatactgcaggcgtcgacatggaggaggagaacaggaccgggacggacgtcgagaccgtcggaccgaaaaccgacgacgagtcgggtgcgggcgtcttgtcagaggacgagctacgcgaggaggaggaggaggaggaggagaaggacaaggaactggccccgctgccgactgtacctcgcttcgtcgtctctaacccctccctcacggccacccgacgcacgtcgggccgcaagacgcagcttcctgccaggttccgcggacccaaccaggctaacgtcctgatcagccttggtcagcgtccccctccggccgcgccgcccaagacctacaaggaggccgtcagcggactttaccgggccgagtgggaggcggccatgaaggccgagctcgatcagttcgagaagctcgacgtctggacgctccgtcccgtccgcgcctcgtccccgccgcctccagtaatctcgggccgctgggtctacacctgcggcccgacctcggaccccgagatgaccaagttcaaggcccgctgggtcgcccgcggctacgagcagcgcgagggcacctttggtgacacgtactcacccgtcgctgatggtacgtcccgccggacttttctttcaatcgtcgccaacgagggcctcacgatccgccaaggcgacgtcaagacagccttcctctacgccaagctcgacgagctgatctgaataaccccaccgtccggctatgtcgacttgcccaatcagctgtgctatgtcagctcggccgtctacggcctgagccagtcgccgaaggcttcttacgaccggatcgcttcgttcctggtcggcatcggcctcgccccgattgagtcggacaagtgtgtcttcttcggccagtggcacggccagaaagtcctcctcatactgtacgttgacgactttgtcgtcgctagctcggccgagggcgtttccgacgtctttgcggccatcgggcgcgagtttgaggttgatgaccgaggctcgctcgaccctgatgagctccgcggcatggagttcacccgggaccgggcgaccggcacggtcagcatcacacagacggcctacattgacgaggtcctcgaccggttcgactcgaccgacatcgctccgcgccgcacgccgatggactcgaccctccagctttgggatgccgattgcccgtcgaccccggacgtcagcctccgccttcgatatcaggagttagtcggctgcctcaattacctcgtcacctgcacgcgctacgacccagcgtacgcagtgggagtgctgtcgcgcttttgcaacaaccccggcaccgctcactgggaggccgccctccgcatcctcgcttacctcgcctgcacgagggtacccgccctcacgcttcgcggccagactgaccggcccgcgctcgagctcttcaccgactcggaccacgccggccacaaggacagccgcaagtcagtcacaggcatcctcgtcttcgccttcggctcgctcgtctgttggaagagcaagaggatcagcgccatcaccaagtcctcctgggagtcctagtacgttgccccctccaagggcgcgtcgcaggtcatctggctgcgggccttcctcggtcaactcggctaccagaccccgtcggtcgccgcctggtcggacgaccagggcgccatcgcctcagtcaaaagcggcgagctccaccacgggtcgaagcacatcgacgtcgcgtacaagtttgcgcgcgacctctaccgggagggtgtgctcgacctggactgggtcagtacgcatgccatgcccgctgacttactcaccaaggctttaccccgcgagacgttcgagcggctccgccccagcggcggcctacagggcccggtctcggcccgcgcgttgttcgtcaactcggtcgtcggtcagctcgctcggcctccgccgctggtcagcatggctacccctcggacgctctccgtgacagtcggccgagcagtgggagtatcagacgagaagaagtcgtcgcccggcccgccagagccgccagcgaagcccgcccctcgcgcccgcggccgcgagcccgcccccaaggcctccaagatcgctccagacgaggacgcaattcagcccatccggacgcaagacggacgtaccatggtcttgaagagttgctctggccgctccgactttgtcctgctcgagccggacacctgggcaggcccttgcgacttggagggcgcgccatcgacctcgttcgacctcgctcgggtcgatcttggtcagccgcaggctctggagggggcccaatcagtctcctgggtcagctcgaccgcccagttcctccgggtcagctggctcttggctgccggcaccctttccagcgctggatgggtcgaggggaggtcaccacgatgagtgcgagtgttgaagaaagagcgtcgtggtagttttgcgggagggtcgccagcgccggcgggaaaagggttacgcttcatcgaacgtgacacgctgtgcctccctccgtaacattactctcctgcccttgcggcttcctccctcatagcaatcttcagggcgcaagtcctcatgtatctcaagcgttcaatcgactgccctgccccttgcaaggccgtgtcgtttaacagacgctgttccagccttttgagaatggcttctgcgattcttaccttcgtccctccctttcctttcctatacttgtgcggcgcctgtctctggcttgcagcaacactttcgggggctggggtctcagcacgagaccatgccgaaagctcaacgctgggcgcaatcaaggcaagggcagcggatctcatatcctcacttaaaccttcttctcatgcgcaaggagtacagctgagcagaagaagaggtcagcagcaatctagttcaaggtgcgcgactgattagccaatacacaggcaggcgaccgcgtcattgcagtccaggagcgtttgcaaaaaagcgggcacaatagcggaaattctggccgccttgtacctacattggctttcgtacttgatgcttggctttgataaaggcttgacagctgccagcagcttctttcgttttccgcagactatgtcggcgtgctgatagctcagacttggaccgatggtcagcgaatcttaccactttgaccgctgttcgaacgccggatggattggaaagaaaagcggccaaaattatatgctgatccctcgcacacagccagctaattatgcagccgtcacatgagagtggcaccggaggatgtggatctgtgggaaatggagtttataaaaacgcaaaaattctccaaacacccagttgccctgttagctcaatcggtagagcgtcagactcttaatgcggtctgttcaatcagcagggtttcatctgaaggctgggggttcgacccccccatggggctagagttgttttggtcccccgttcaagcgtcccccgttcaagcgtcccccgttcaagcgtcccccgttcaagcgtctactgttcaggcttaccagcagaggcgtatgtattgacccgctgacgatcgccaagtacttttccgcttgagctcttcactccttgcaccgtctgttctcctttgtgcccctgctaccatagccaacacctgcccgaccatcagatgaaccgacaaccaggtcgagggtatgctcgaaaatatcaagagcaccgccggcgacctcattggggccaagaaggagtccttcatctcgttcgcacacttcatgttgcggctcgtccagacggtgtcgaccgcgacggacgacatcgacctgaaggtcacgatgatctggtcgcatcccagccgatatcgagccctgctaggaagcggtcgagtcagctgaagcgctggccgtcgctacttgctcgactgtgatcagtctcggcggcggaaacctcgtatcttgcggcggtccgtcaacctttaccgaattcatcctcctccaactcgcgccgagcgtccggctctcggagctctccagccgccctccgggtctgcccgacttcgcagtcatgtggcttaagcggtgagtcgccacggccgacgatgagactgtcgcagaggccatcactgttggagttgcgacgagcgcggggcgagacgcagagggagcggcggcagcaggcggctgcacgctcgctggcggccggaacgcatcggcatttctccccttttctctctccctcttagctttccgctccccttccttccgtagaggactcagtccacttctgggtgactgagatcagtcccacctttctgcttcgctgcccaccgctcgtgacacgtcctgatccctactctaggtagctcattccatactgtccttccctcaacacttcaatggcataagatcttgccaaaaagaacgcgcatatcgagctccacagttctgctattgtaggacgagacaggaggcagggccgactcagtctcaggactactccgtgaacgactcatggatcccacctgtaggacgagacaggaggcagggccgactacagtgggggtgagctactacctagggggggggggggggggggggggggggggggggggggggggggggggggggggggggggggggggggggggggggggggtgggggggggggggggggggggggggggagagaaacgtgcacttgtcacttagggacgagagaagacagtcatcacctggttcacgttgcctggagtgcagcggtaggtctgcgcaatggctcccgggccgcgcgagccgtcacgaatgtcgacacaggtgacgccgccctcgatcgcgatgcctacagagagacgggtcagagtgtcagtctgagagcaagtccgcgtctggcgtatgcatttgagaggctgctcacggttgtcgtccgtgaagtaccactgctgctgctggacgtcgagcttttcccagaccttgagttcgacgttgttgtcgttcggggaaacgccggcgtcgaggcagtagttggggtcggcgcgaaggcagaccttggtcgagccgcgcgaaatgatccagtcctggcctggcccaccgttgcaagggaaagagaggaccttgctaccgctcgtgaagggctgggcgacgcttaggcaaaggccctcgacgccaaaggggtgaatgccggacgagctggggacacccgacgggccggggccgacggccgaggacgaggtcgaggtcgggggcgcgatcgaggtcgaggaaacgaccggaggagggttgacgggagcgcccgttgtccagacctggttcgagtttcccgtcgctgcaacaaagcggaggaggtcagggtcagcgggagggtcaatgaccgcaagaagtgcgctgggcttactgcattcccaagtctgaacctttcctgctcctccgtccacatccaagcacgttcgccctccagtgatggcgatgcctacaatcatgggagagagagagagggtgggtcagccgagggtccttcgagcaggaaggataggaaacgcccgtacggttgtcgtcggtgtagtaccaggtctaaggcggatgagagggcggggttagcaaaggagacgcacatgagaagcctcggatctcaaacttacctgctgaggaaggttcgcgaagcaggtccagagcttcgcctcgacaccgttgctgttggggcctgcaggaaaggttgcgtcagaggctgttgaagcgcaactgagggaaagtaggaaaagcgactcactgacgccagcgtcgaggcagaagttcgtgccagcaagacggacgctgccggagccgcggttgatgacctgtggtgcgagggaaagagggtgtgagtaaaagagtgcggctgggcgagggaggtcgagggagagggaggctcacccagtactgggctgcatcagccgcgccggcgcagttgctccgggtgacgacgttgccgttggcgaagccgcccgacccagggttggcggtcaggcactggtgagggcgcgtgcttgaacgggtcagtcggagttagagaaaggcagacggagcaggagagggacgaacgaaatccgtcgactggaagcggatcttggacgacccggcttcctggcgagcagtgaggggggcagcgagcgcgagcccgggaaggaggagtgtcgagagagcgagggcgagcatcacgagagggtttgagtgctgggggatgattggatgagatggaagagagaggagatggttgcctcgcggcgctcttataggccgggtccgcccccaacctcgtcgtcagctggcctccggatcccggccctggttggtcaccgatggacaagtgggcgtcgctttgtgccgccagccctggtaggctctttcggcccaagtgggaaggtcagcccagaagaggcaggaagggcaggggcgtaagcgtcctgctggccgtggagtggggttcagcgagagcagccttcgtcgctcgtttggccttctcgtcggtcgctcgtccggcggctgagcgcgatgtcatgggcggcaagccgggcgagtatgggtgcccgggaccgaagagttcggctggccggcatgcccaaaggggcaagccaacgggcccgatggggaaaccagcgaagctcggaggcgtttgcttgcctcttcaggccgaaggcagctcggcacagtcggtggggtgagtgacagtgtggagcgtgaagcctcaactctgcaagatgttgattcagcggcggcggatcgacgtgagcgaacaagaggagatggaggtcaccaggtgcgtcgaggcggaaaccctacggagcgccaaaagcgatcgctttcgagacacgccctgctgcgcgccccagcgccgtcagcttcagctcccctcctcatcacttctcggtcaccagccatggacacagcaggaggcgcccgcatgtcgtctcgcgatcagcaggcagaggggtgggtggaaggcggaagcttctccccctcccttcgcagcttgaccctcgcgagcaagtgtcggccttcgccgacggcctcggttctgcagctcccagcgcccgggccagacacacgaggcgatgaggcgggctcaaccttcactaacgtcgctcgtccagctgacgacgacgagctcggtccgactacaccccggctgccgaatgaaggcaggcttcctcggccagtgtcgaccgatgccaatgcgtcgatgccagccctctcaagagcttctctcgctcggccgccctcatcctcgccgtccgcaccccctcctggccatgcgttactcacgctctggctgctggctgctgtcgcacgagacacgtctgacgatactgctggccgcgactgacggctgggattgaccgaccgggtccagcctccgacaatgatcttcggaaacggaggctcaaggtgcagggcagcagccgacctccttgaaggcggcacgcgcaggtagaaggaaggcgtttcgatacagtaggtgttgtcgaggggcaggagcagaggatgacgcgtgttttgcagagcgcagcgaagagtgtcaaggaaaaagggagcgggagtgggagagggagagcaacgaggttttgagagggccgtagccgggtgtatcgagcaggactggcccgcactctagatggcctggccgacgacgtgctcgcgagggtccgtccggcgagagtggtcgacgcctccgacaccagcgatggccgagcctccgccggcgctgtagtttgccttctcgaccgcgtcgtcgagcgcgagcgacctcgcaccctgccggcggatccgaagcggcatctgctcgtgccggtcagcgcccgtacagcacgcaatgtcgtcgccgccgcggaggagcctttcgagctcggcccgctcggcctcgaccttgcggccacaccagtagtcggctacaattcgatcagccttgggcccgcctgaggcggcgacgatggcctcggctgcgcgtcggccgacgacctcgtagaaaaagccgggccggtcggccacggggaagtagtgcagctcgtgctcggggtcgttcgagggctcgcggacgagcggctggatcgtcgggctgattgaagagtctgcgtcagcaaagggtcaagatgcaagaggacgactcgggcactgacaggatgtgcgtctcgtggatggagcgggcgacgacgacctcctggtacgtctgctttgtgtggtggtggagccgctcgcggaggacgggctgctcaatcgtctcgatccagtcgaccaagcccttgccctcaggatcccttggcttgatgccggccgtcgcaaagagggccttggcaacctcgtcaaacggcttgtcggccggctggtgctcggcccggatcttggcgagcagggtggcattctgggcttcgtgcgaggcgatctggggcgtcgacgggtggcgctcgtcgattccgaggtgcgaggcctcgtggccgcctgcggccggggccggggcagtcgcgttcagaggggcgtccgggttgtgctcgacctggccaagcgtcgaggcaaactgatgggcgcggtccgaggctttcgccgaccgcacaaattgctggccgctctctccgagtcgggcagaagcgagcgaggcggtgagggcgttgatgtgggcgtcgccagagggacgagggccgtcgccggtcgtcgtggcggccagagggacggcaggcgtggagccgcccgcagcagcagcagcgtcagagccggccgtcatggggacggcaaagcggtcaaacgtcggctggggaagcgacggtgcggccgaggacgacgacgacgagcccggcacgggcggggctgcatgagaaggcgggttgaagctgtcgacctcggccggccgggggacgacgacgtcggcaaagccctttgctgcggcagccccaccgacaggagcgctgccgccgttgccgtgcgacgacggcgaggcctgctgggcggccaactggcgagcccgaccggcgccgtcgacgctccgcctcggcgagcctgacgcgagcgggtgcgagggcacgggagggacgccctcgcggtcggcaaagtggccgctcgaccggcgggcgtgggacgacgagtcggccgacgtcggcgagggagggagcgccttgtcggtcgtcgacgaggtcgacgcgcccgaggccgagcgcttgtgcttgccgagcgagtcacgcgacttggaccgatggaggatcttgtcgaggagggtcatcctgagagtggagggaggaggagatggggggtccgtacgagacgaatttacgctctgagagatttctgtgacatgccgatcgtaaaaaggagtccacatggtgagcgagatttgagtttcggtagcttgggtgaagatgagcgaggagtccagcatcgacggcctcatgggaggtcacccgtttgatcgttatcacgccctcatgctctttctatccgcaaaggccgcctgtcagtctatgttaggctgccgcagcacgctcaagcacattacactgatcttgcgagggacagggaggcaacgcggtagaccagtagagccagctcctgagatactgaaaggaaggagaggcgatgtagccggaccggatccaaacgaaacgaaaatgaagggagaagggattggtgagaggttaggttgaactggatctttctcggcgcgccagagccgttcaggcaagagctatctagcacactgcacaggatgggcctgacatgggagagagcagaagagagagagggccgaagcaaaagacaagtaagtgattgcctaccgaaagcgggtcaggcaaggagctgccaatgggcggcgaaaccgaatgccggcaacagacctgagatcagagttggctagagttggcgcagagacgtggctctcattttcagtccagtcctgaaaagagtgttgttctccttttgcggctgatgctcactttcgcaagttgacttcaaacggagaagattcagcgcgtgatccctgagaatcctgaagatcctgagaatcctgagaaaaccccctttgatgaaaagccggctcgagatcgattaactaggacacgacctggaccaattccctgtgtacaaagtcccgatttcaatgcttcaggtcaatggagcaaccttgctactttgtgaagtgctcagccgtcggactcctaatcgacgttgcaggttaggtgaccgcctatccaaccgaccattaccctttttcacataggtaagtcatagccatactaaaatgtacagttcagagagagagatgaaacaatgcacgggctactggcgcggctactgccggtgtagtgtatgcggtactttacctcaagccgagcattcttgacataagcatttttgacaaatatacaaacagcatcaagtaccttctatcgattccttaattgtctaacggctatgatattcgcctctcacgcgaagggcccgggttcgactcccggttagggattgtttttgccccatttcccgctaaacaggcacaacaaggcagggcgctgccctgggatctcggtcggatcggcgtcagcagtagacgatgacgtaaagaaggaaggcttacaagcggtgctgctgacagacacgaggtcgagtcgggccggaaaggcccaaacgggaatgagacggcagtcgtcgtcgattggggcctgtgagccgtatgcgctagtcaattacttcgtcgtcgcccagcagagctcctcccatcaggggcctgagagtaagacaacagagtgctatcctgaaagaaccatagcagcatctttcatgccaaggcaaccggatttgaagccgggcaagatgccgtcagctccgtagggagatgacctcaaacggatctgcgacacaaaggggcttcaatcagcgacaattcgaggcgagaggcatgggaacacatgcagcctgaagcagggtgtcaacgcgggacatggcgatggcggctgtcgtcgagtgggttgccgaacctccggcggcgggcgtcactatgccttgaaaaagtgtagagtcggcgagcgaggacgagacgaggcctatggctgaggagaaaggcgatgatgtcgacgcctgagccgcagcggggtcaatctcgagctcgaagacacggacatggggctttatcaagaatgccagccggccgcgcagctgtccacggcctctccaaccctcgcactgtcttttagattagctccaaacctctcaagatggctcagcagccgctcaacgccccttctcgcatctttcttgaaggagcttgcgaaaaggcgcctgcgccggccccttgggccacagtcttgcctgcgcgcgccccgcctgccgctcctggcctggtcaggcctatggaccgtcgaaccgggcctcatcagggtccagcaggttgttaggccctgggcctggtcgaggtcaagaagggcgaggctgatcgtgtcgaaggtgcgacctgcggcctgggaatcgcgcgcgcgcatgttaatcctgtttcgccgcaccgctgtgagctgtcgctacggccgctcacgtacctatcaaccagacatcaataagaagatttccatcaaccttcatacaccccgctacctttcgccggagctcccaacgctgccaccaagtagagcaggtgatttccaccgcaccgaaagccagcttttagaggttcaggccgacgtcttgagcgaggactttgttgaacgcgtccgtcgaggttcacaacctgccgacctctgacaatgagctcaacttcaaagtcaagagatgcccgacctggacgtattcgcagcaacactcatagtgtgtctcgagtgagctttttcgtcgaggttcgagtcgtctctaagcattttactcatctgggccgccagcatatcgagcgcgcaattaaggaatagaaggcacgctgggcctgaaaaggaggcttcgtgcaaagtggccaaagaagcagggaagtcgagggctggtcatgtgcatcacatgtaaataggcgttcctggagcgtcttggcctggccggcgagcatgttgttgtagaagggccggctggtgcgctccttccacttcatgctgtgggggcagtacttgccgtttgcgtgctgttagtccccctgcgcggtctgaaaccaggcgtcgcagagctcgtcgatagcgcgctgatgcttggtcgggtcgttccgccgtacgcaggcggacggaagcgattcgcgctcctcgcgctcctgcaagaccacggcctcgtgcgcgaggaagtcagcgtgcttggtgctcttgacgcacgcgtccgtgtggcactagacggagcgaagcagcgcggccaagcgtcgttgggagtttgtcaaggaaaggaacgagcgagcgagggaaacgcgagaagcgagggagggggccaatgtactcagctttcgtgctcgaacacgccctcggcaatggcctcgtcgataacatcgtacccttgcaggaaaggggcaagaagttcggggtgcggttttttcgctcgtgaccgcggaggaaagtctcgagaccggaaaggtgtctttgaccggattgagaccgggtcagtacagcgggagaaaggcgaggcgacaatggagggatgcgggaccgggtcaggggacatgaccggaaggccagggccgaggcagagaaggggaggagggcttcagctctgggtcatgagggccatgaagggactcgcacgctcctcgacgatgtaatcgagcaagcattttgggtcgtgtaggcgccaatggcggcgcacatgcagccgtcaaggagaaagtgcaaaggagccgtcagctgtccagggtgaaaaagcgcagaggatagaggtgaattcggccgagcacaaagtggctgctccaactcgagccaaattgaccggtcaccgcaaatggactggcaaatctggacggcactcgtgccctcggcgacccgccgcaaagtcaacacaggatgcagtcgtccttggaggtctcgtcggcgaagacgagctcgcgcggcccgatcgtatactgcgcaattttggccgtgtatcccacaatctgctcgggcgagggatgagcagtactcttgcgtaacgtcttgtgagagataatgttgcgctgaagcacgcgacggtagatgagagaggttggcgaagggatgtcataaagggtgagggcaaggacgagctcgagcagggtcgcgtcattttgggcaatttgaccgacagctgagacattgatcagcttgcgtttcgagatgcgctgcgcgggagcgagcggaacggtacctgctcgactcctttatgcacctcgagcgcctgtttccctgaacagacacggcctcgagcaggcgatacgtgatgaccgtcgcctcgtacagaagtttgtggacactatgcagatgtggagaggaacgtttgagggatgcgagacttcgcgggcttgacaagatagagcgtgaccagccgggacgtgacgcgaaatcccaacgggaggacatcaatttggacccccacagtatgagcgaaaccgccaagccgcgtcccactcacgccgtgcttcgcttcgcttctatgcattgctcttgtggagcgcatgacgtttcgtgcatccaatcactcatcaggaagaagaaatggcctgcagaacagcaaaagcagaacagaggactctcctaggacgtaggttgttccctcccccccgtcggcttctccccccagcatgtccttccacaacggaatcgacattgcccagtggcgtgcccaagtctctaccccgctggctgcggccggtccgctcggccacccgtcaaaagtggccccgctcgccggcttcggcgccctccccccctcgcttacgctcctcccggccaaggtccggcctgcgcacgccaagccggtcgctctccctgttaccgctgccgccgccagtggtgaggacgacgacaactgctgctcgacctcgacgaccgacgacggtggcctgccgtcgctcgcggccggcggctcgagcgacgactcgtcctctgccggcccgacctcaccgtccgaggctgaggccgaggacgacgctgcacagattgccgctgccaccaccgccgccgccggtctcgcgacggtccttccgctgccgcccgtcgagacgcccgtcccggtcaaggtcgctccttgcgcgcgcgacgagcgcgaggcaaagaagctcgaggccgaccggcttgtcggtcagttttagctgcactagacttcctgtcgatcggagactgacatttgctgcgacattgcagactcgacgctcgagctcctcaacgccatctggcaccatccctcgtcgccggccgccgagagcgggagcgcagagggcggcgtcagcctccggacgtttgtcaacgagattctccgccggtcgcgttcgtcctgcgcgacgctccgtgccgcccggtggtacctcgaggtgcgccccggcgtctccccccttgtcgagctgcccgaggagtgtgctgacattgcaagcctccgtcgttacgccagcgcgcctccggtctccttcctgttgagcgtgcggccgagcgcgaaggctcgctcgcctgcccgcgccggacgtttctctcggcgctcgtcctcgcaaacaagttcctgcatgatcgcgtctactcgaacaaggcgtggggcaaggtctctggcctcgaggtgcgactttcccttctcgccttcccatctgttcatcgaccttgcgtctgaccgcccgtcgctttcgtcgtcacacgaaaaaagacgaccgagatttcactcggcgagctcgccctcggctcgctgctcgactgggctctctgggttcgggacgagcccgtcgccactgccgcgcctgcgcccgtcgagccgtccccgtcgacgacgatggccgaagacgacgcggccccgccgctcgtcccgctcaagtcgaagcggagctttcagcccaagcggccgcttggtccgggcaggaacgaccgctcgttccggtcgacgcttggagcttacgccccggcaccgcacgtccctgccatctctggcggagcgccgcagccgcatcagcagcagcagcagcagcagcaaccggccaagcggcgcttcagcgcgagcaagagcttctcgccctcgacttcgggctcgagctcgggcagcggcggcgcgacagttgccaagcgggcgcgtgtcgtcggcgccagcgcggtcgacgaggagcagcagcagcagccgatgagcggcgtcgaggacgcgctcgtcgcctcctgggagacgagaatgaacgcgctcctcgccgtctagaagggcggtggctggcgaggaaggggagggggacggtcgagcgtcccgtcgtctcggtctctctgtctttctcgcctttctcggcctctcgtccgttttgcttgctcgtcgcccgcctgcccgtcttgttgttactttctttcctcccttcatgcactgtcatcttcctttgcttatggcgatgctccgtatgctttgccctccgagagaccgaccgtcgtcgacagcagtcgacaggcgaggtgcctctgcccgcgcgcgcagtcgtttcggcccgcgcggcggaggatttcgactctggctggtcgaggagcgtcttgctttgcaccttcctcctcccatacctcgcccgcctcctctcccatcttcagcaccatggccgaagctaccgcgcccgcccttaccaagaagcagcagaaggctgccgaattcaaagcgaaaaagcagaaggaggcgctcgcggccaaggggaaaggcaagaaggcggcggccgggccggcgctcgacgatgggttcgtcggcgacgaggacgagccgatggtagagaaggagccaacgaaggctgaggacgccggcaagcaggagaagcgcgagaagaaggcaaaggcgaaggctgaggcggccgctgttgctgctgctgctgccgtcgagacgccggccgagccagcaggatcggagctggcggcggccaagtcagctaagggcaagggcaaggacaagggcaagagcaaggctgctgctgccgaggacgagacggccgagggcgctgctagctcgtcgtcgacggcagctgccaaggacggcagcaaggagcccaagcagccggcgaagccgaaggccaagccgcgcttcatcctctttgtcggttcgttccttccctgccccctttcgagcctccctgcctcgaccttcacccgctgaccctctctctcccgttggataggaaaccttccccgaagctcgaccgcgcctgagatcgccgcctggttcgaagagcgcgtcgaggtccggccgtcggtccggctgctgacgagcaagcccccgccgagcgcagcctcgtcgtctggccctggcgagagccgagggatcgcctttatcgagtgcgtcttcctgagcctgtggacttgcgtgcgaagagctggcactgggacaacgtacgagctgaccgtcgctgctgattccctccccaaggttcaccgactctgccccgctcaacgcttcgctcgccctccaccagacgccctaccctgtccccggcgcgcggcacggccaggtcaagaagctcaacattgagctgacggccggcggcggcggcgcgggcgccgcgcgcaagacaaagatcgacaagcggaacgaggtgctgcgcaagcagacgggcatgggcgggcttgacggcgaggaggagaagaaggcccgatgggcggcagaggccgaggccaaggcggccgagaagggcaagcggaagcgcgggggcaaggcagacccgatggcggagaagccgacgtttggcgcggcagaggcgaaagtcgcgagtggctggggcgaagacggcgcgggtgagcgcgaagccaagcgggcgagaagcgggacagcgccgagcgccgaacgtggaggtcgcggcggaggtcgcggcggcgccgccagaggacggggcggtaggggcggggcggccagcgctggtggcgaccgacgtggaggcggtacctggacgccagggaccggcgccaactttacggccctgggttgaggtgctcggtctcaaggggcgtgtcgtcctcttgcatgctcttctctcgggtcgcgggcggtgaggcttttaatcagcaggcgccgcatcatgtcccgcgaaccttgggccaagtgagcactcacggctgatcgccttcgcaagcctactagcgcatttcaaaaagctgttcagtcgcaaatgctgctgttctccctttcgtcccggcttgtgagggcttcacatcaacgaacaagtactaacaaggcatcatccaggattaagaggcaagagattgcgcagacgaggcgagaagctgctaaggaaagcagaaggcgagttgcagaagggaggccagtgatggcggaaggctctcggggtttacaaggaaggaagaaaggggggaagacgacacttcccgaggctgaccgtttgggccggcacggcccagagtgcatggcaaggttgtaaagtttgtgctttatatcggaagggagggggagcggtcgacttaacggcacgccgtcgtctgcggcttaggcgtagcggacgcaagcgccggccttgcaagtcatgttcggagggaacagccggcggttcgagcagctgcaagggcgcggccagaaacagagggcggggggtcattaccttcaaaagagagccacacaatcggaagatagagagggaggggaggcgaggacgtactcgagcccgcgacgctggagccgagaggaagtagggaggtggcgcctgttcgacgagacggatcgagcgatgtcagtcctcagacgtcaagagagtggaggaagagagggggagacgtacgcattcgccgactgtagctggagcgccgcctcgacgtgctcggccggctcggggaagacgccgtagcggcagccgccgcatgactcgagctcgcttgtcgtgtcaatgcactgcgcacaatcagagggttgggcaagttagtcgggtgctcagcgactcgtaatggagcaaaggggagtacccacctcccagccatcctcggtgcccttgacacggcaagcgaccaaccccccgggacagagcccctcggccttcttctcgagcgccttgcgcacgacagcctgcttgcgctcgagcgccgcgcgcttcgacgggcccggcggcgatgggcatttgccattgaccttgtccttgggcaggcaggtgggctctttggactcgccggtggcggagacgacggctagggagagggcgaaagagaggacgagggcccagaggaggcggcgggggttgaagagcatcgtgagaggccgtcccctccgcttcctcttccgccaaggacactctagcgccatgcctccgtccggtccgtacgggcactcccgtcattccctgtcatgccctttccatcggtggctcagacctcgacccgcctgcctcgcgcacgccttgcacatccgcgtccccctctcgacacgctccttccctctcctccatgttgtgcgatcagaccccctttctgctttcactttggcgactctgcttctgcgagtcatcgctgcgagtcgcccgacgaggccgaggcaacgagaaagccgccgacggccgaaccgccgctgtcgctccgaagctcgtccagccctgcgaccttgacctcgaccatctgaagctgcacccatacacctgtccgtagccaacgcgtcggctcgcaggtcgaccgacgtccagccggaccgaggcgcctacctcgcttgagctgggcaagaagctgacaccttccctgctcgccttctcccttccccgcgacggccaacctcgtcccaaacgacagactgcgacagctcccttcgcttcctccagctcgcccacagcccttccagcaatagtttggcctccccacgactatgctaacgaccaactgccccggcctcgagctcgtcgcccgtggcaaggtccgcgacatctacgccctcccggagcaggacgaccggctgctctttgtcgcgaccgaccggatctcggcctacgacgtcatcctcgacagcgtgcgtccttttgcttttcagcctcggagagctgtctaggcgattctcctttggagggggtaatcgagaaggttttgctggacattggccggccggtttcctctcgataggtcgtagccctgggtctgccgccggagccgcggtcttccgagctgccttggttgagtccagcaaggctacgccaactgcctctgtctcctcagatgggtagggagacccgtgaggagaggaggcgtgcatccgaggtcgaacctcagcccatactcacctgctgacgacctccctacctctgcctcgtcgcgcagtcaatcaccgaaaagggcaagctcctcacgtcgctctcgctcttctggtttgacaagctcgcgcccatcatccccaaccacctcatcctgccgacgtcgctcacctcggccgaggccgactgggagcagttccccgagagctgcaagccgtacgaggaccagctcaagggccggtcgatggtggtccgcaagtgcgaggttgtcaaaattgaggccatcgtccggggctacattaccggtcggtccgtcgatttgcttgcgaaacacgcttaggctgaccttctcgtgtccgctctgttcgactcgtaggctccggctgggtcgagtaccagaagtcgggcacggtccacggcatctcgcttcccgagggccttgtcgagagcgccaagctggccaagccgctctttacgccgtcgaccaaggctgatcagggcgagcacgacgagaacatccacccggacaaggttgtcgagatgtacggtccccagctggcagccgagctcgagcgggtcgcactcgccctctattcggccgcggccgagcacgcagagtcggtcggcctcattctcgccgacaccaagttcgagtttggccttctgcctgccccaccagcgggtgccaacggctcggcctcgcccgcgccggcccacggccagctcatcttgatcgacgaggtcctgacgcccgactcgtcgcgctactggtcaaaggacgcctacgcgcccggcggcccgcaagagtcgttcgacaagcagtttgtccgcgattggctgacggccaacggcaagaaggcggtcgagggcgtgcgtctgccggaggacattgtcgacaagacggtcggccgctaccgcgaagcctttgagcgtgtcaccggccagaagctctagtcggggtgatcaatcgcaattgtagaccgacaagccatatatcaggcttgccctcatcccggcttcgtttcgtccagctgtctttcccgcggcttcgcggctgccacctgagcccttctttaaagggtcagcaggtgatcagcagggccaaggccggccacggggaggaggaagctagtcagcggaagtctgggaggaaacaaaaaacaacggagcaaagctgagctatgaagaaactaggcaggtgggaaaacgaaatgatgagcaggcgcgagtggcaggagcgatgccgatagacacacacagggcggagacgacctgcagggcgtttctcctggtcattctcgacgagcagccgaggaagttggtctcgaccattggacttccttgcgggcatggcgtcggaagctacgcgcttgaaccatcagaggtggaagtgaatgagcttgtaagtcagacaggggccgggagtctacttgaggcgcaggtacttgaggcgcaggaaaggacgcaccagtagacctgttctctcgtaagcctatcgcttgtaattagctttcgaagctgtgggcttgatctaagccggccgacaagagaagcggtcggatcagcgtcgagccgggctggacaagcaaggtttaggcgcacctcaaggcaggttgaacagcgactgacgccggcgcgccctggagaagaagcggacgagcgaatctcgcgctcatcatgagcatggtcgtgaagggctgcaggagagcgaggaaacagtgaggggacagttggcgagcgagcagggtcagtcggcattcggcttgtcaaggacgagcagcaatcgggcgcacccaataagccgagagggatcactctcaagcaaagggaggctcccgtagctggccttgccggtcagcacgtcctgtcagccagccggatcgtcctgctcgtcattttgtcgtcgtacttggctctcacgtcgcatgacatgcgttggcggccgctgcacatgagcccgcgctcatccaagcctccaacgactgaagtcagcgaccggctgcagagacgacggggtcgatcaagacaggcctttgatgctgccctgcttcccatcgtcgagacccggagcttcccatcgtcgagacccggagcgacgcatttcgccggtaccgatgcgtgtggacagggacgtggttaggggttagggttatttttttagggtgtaacggggcatgcgatgggagcacagggtcagaggcgctatagacggtggtacattggaggcgagaaggagttcaagtggctaaggggcttcgcctaaaaggcgaagaagcgagcacgggcacggagcagagagagcgagaggaggcaagagaagagaccatagcggggcataaggccccgccagtgagcgaagagagcaacagtcgaaggagaaagagttccaccggtcgagatgacgatcgggtggaagggagacgacgtccggccgtcgtacttcgagcgcttctggttctcggttgaagtgagttggttgaggagagaaccagaggcgcaagcagtacgcggcgcagcgtcggcagagacaccagcaggcagcagcgacgacggaaggccggcgacgtcggcagtggcaatcggatcacggccagcgagggtcgccgcagacacgacggcaacgtcgtactcggagacaggaccgccgaacgagccagggccggtcacgcgcaagtccgtgcgctggcgagagcccgggacgaaaggctcgagcgcgacgcgagtgcgggggatggagccgagatgacgcgagagcaggcttttgacgtgctcgtggcgagcgacacgccagaggggacgggccgagcagatgtcgtcatggccgacgacgttgggcagcgagcaatgtgagcagtggtcgtcctggccggggcagagcgtgcggatcgacaggccagcggcgacctcggtcgacgtcagacgtaggttggcagcgaacgggatggccgaaatttagcgccgggcgatgggcgaggcgttgtcgagcacaaccgctcggtcagtcgagggtgttgaacgacacggccttgcaggggacaaggcagtcgggtgaacgcttaagatacatgaggacttgcgccttgaaaattgctatgagggaggaagccgtaagggcaagaaagtgatgttacggaaggaggtaaagcgtgttacgttcgatgaagcgtaaccctaacttccggcgccgccgcgcgggcggccgccgccgcgcgggcgggcgctgcagcgcgccggcgctggcgaccctcccccaaaactaccacgacgctcttccttcaacactcccactcgtcgtggtgacctcccctcgacccatccagcgctggaaagggtgccggcggccaagagccagctgacccggaggaactgggcggtcgagctgacccaggagactgactgggccccctccagaggttagggttagggtgcaacggggcatgcgatgggagcagagggtcagaggcgctatagacggtggtacattggaggcgagaaggagttcaggtggctaaggggcttcgcctaaaaggcaaagaagcgagcacgggcacggagcagagagagcgagaggaggcgagagaagagaccatagcggggcataaggccccgccagtgagcgaagagagcaacagtcgaaggagaaagagttccaccggtcgacgtcggtgccaccaccgccaccatcctcgccgccgccgccgcctcctcctcctcctccatcgctgccaccgccaccgctgccatccgcaccgtacggccgcaacggaacaggtctcaacaacggacccaaccctggctggacccgaccggatcgccccgagaatcgccagcctccactcaccggccagcgagacgactggtcgtcgggtcggccgagtgcgagcggctatggcggtccgccgccgggcgcgaatgggcagcactcacgtgagggcgcgataggtggtcagccgcctcatcgggacgaccggtggatgcccggtcatgagccgatgcagcatggccgcggggcgccgttcaaccagggccagccgttcgacggaccgcctcatccgcaccaccctcgaccggaccagcgacggggacctccgcaccagcggcccgactaccgctcggacccgccgcatccgacgccgcactacggcatgagtgggccccaggcgtcgcgaccggaccaccggctacctctcaacgaccggccactgccgccgctgcctcgaccctcatcccactatggtccgccggaccgaggccagcagagtgacagctatcggccgggcggcgcctacatggacggacgagacccgcgcgagtcctacttactgcacgccgacccgaacgcccggatggcagacaccaccaacaccaccgaggcctcgtctccagcgcttgactatggcggctcgccgcctcacggccagccttcggaccggcatcagccacggcgctacgggccgttttccggccacggcaacgagccgagcggtggaagccatcgtcgttcgcgcgacgacgaggaccacggccgcgacagcgtcgagacttggggcgagacccacaagcggccaaggctcgaaagcaatcagagcagccacagcagcagtggcccgtcacagcggctgccgtcgccttctcgctcggcttacagcacgtcttcgcggccgtcgtacccgccggccggtccgcagcggagcgaggccgcctcgcgatccggagggcccagcgtcgacgccaacatggacgacgacgatgccgacggctcctttgagtcgggcgagatcgccgagaagccggccctgtctacgaggcggccctcacgctttgacagcggcgccccgtcggcgcccgagctcgagaacaagctgcctcatacgccgagcgggctgccgccgagtatttgcacaaaggaggtagagacgtcgcagtcaacgccatctctgccgttaaacgcgcccctggccggtccctctgacgccgccccgacgctctccgcgcctgccgtgtcgcagacggtcagcggccagtcgacggcgacgcttgcttcagatgcatcgttgcgttcgccggcgatgccagccagcccggccaatccctctgtcggcaacgtttcgccctcatcgccgccgctcctgccgccatcgcccggtccggcacgcgaccaggtcaagacagtcaagatcaagcggccgtcggggccaaacggcacttcagcggcggcggtcgaagcctcggcgacggccgtctcgtcgcttcctgcgacatcgtcgcttgctggcggcaagccgaggggccggccgccaccggccagcatgatctttgagcgcgcgatgcaagcgtcggtcaagcgcaggcctacgccggggccgtcgcactagccgacgctgccgcgctcgccgtcgtcatgagtgccgggtctgaagctcgatattcatgcacccctcttgctgacggacccgccgctggaagaggaggggacatgcgaattgagagatcaagcagtgcagatggcgcagagaggcgccaaatgggcgcggtctagagagaacagatgcaagcgaaagttgagaggtgggcgggccgatcgagtccatcaaggagggccgggcgctcgcacgagagagagagggaaagtcgaaggacgagaaaggtggcgactgcagcgggtgtcgcaagtcttggagagagtcgccggatgggtcgacgtagactgacgttcagccggcgatcgtcatctggcaggccggaggagtcaagtcagctgatgacacacacgtttcacacctctgccggctctggaacgcacctgcttcttcgaccgggcccgccggcggcgcatctgcatctcggagccagcgccgcgctcctgcggcgtcggcaggaagccgagcgccgccttcattggctcctcggggatcgcgccgccgtcgatcaagtcgtcggcgccggcgccggccttggttgggtgagggatcctcatcgacggccggcggaacgtcgacatcgagaccttgcgcgcgggcgcgccggcggcgagcggcgaccgctggtcgtcgacggctgacggcggcggcggcgggccgtcctgctgcgggaaggcgtccaggccgtcgggcgtgacaaagcggatcggctgcgggctgttcttgtaggtgatttcgagctgctccatgtagaacctgggtcgagcgtgcggcgcggaggtgtccgggtgttggtcagtcggcgctttgggacgagcgggcgcaacgcaaaagacgcacttgacggcggcgtggaagcgggtccggcgattctggcgggcgccccagtcctgccaggtctgcagatgggggatgccgatcgtcaaggtcatcgaccgctggaagtcgatcgtttggtactgggttcggagggaaggggccaggcatcagcacgacctgtacagatcagacgcaaggcgtcagagaccagcaggcgcaccatgatggctgtgctcgaggcgaggtcgcgcttgtcgtcctggctgagccagttgttgatgcgcttttcgagctgctcaatttgctcgttggtcgtgtcccagccgacctggaccgtcatgttttcaaacatgccgcccgaccggcggactgcgaggcgagcaatcaacgtcagcagagaaagctcgaggcatgattcggcgcggcgagagtgcgcaccgttcgtgatgaagctgttgaacaggatcgagtctgcgcgcggtgagcaggacgaggttagtcaagggtgaaaggtgctgctgcaatgacgggagggcgtactgtaatagtaggcgtcggtgccatcgacgcggacgaaggaggtcgaccaaatgcccatcttcttgacgactggcggtcagaagagttgacggtcagagtgacgcaaggggtagctggagacagagggacgaaccgagattttcggtcccgataaagacgcggtcgcccgtgtcgtagggatgagtgacaaacaaaaatataacagagtcaaaggcgttgctcgctgccgacttgaagatgaaggacaggccgatgagaagggtgtagagactgaaggcgggacgggcagggagcaatcagtggcagtttcccaagcggtcaaaacgacagacgtacctcgtgatctgcgtcccaatcttgacgccaaagatggcgagcgcgacgaagaataggatgatggcaccaaagaagaggagcacgttatcgagcgagccgacggcctcgtcgacatccctgcgaggttcgagcccgagtcagcgaacggccgcgaggcgcactgcaacagatctgcgcggacgcactggagggcctttgcgaggaaccgcctctccttgtacgtcttcatgacggtcgacttgatctcgccctttgaaatgtcgccgttgccgtccttgtcaaagatgcgaaatgccgcctgcgaggcggcgaccgtctcaaacgcgacgtagaagtcttcggggacgaggtaggcccgcttcttagaccggtacgacttgtagatcgtccgcgcgaggttctggggtgacgatcgagcgaaaggggggtcagcacggaggcccagttagtcggtcgccgcgaaagagtcaagccgcaccttggccactttagcgctcgtgagcgtgctcgtcagatcgccttcatctgtccggccctgcttgcccttgacgttgcgcgcgtcatggagcgcgaccttccggacgcccttgccgacgagccctgcgaagcggccgaacgcaaagcccgaggccgagccgccagcggctttctcctcctcgcctggatcgaaacgctcagccgacgagggagggtacgagtggcttccggcggcgtactcgccggccgaggcgtcgtcaaagtcggctgcatcgcgctcggcagcggctgcaccggtcagcgcagccgacgacgacgaggccggggtcgatcgaccgcccgaccggctcttgacgatgaagcctgctccgccatgatgccccttgcgcttctcgcctccaacgttgctgctgccgtcggccgcggggctgactttgcgcgagctgaagaggctccgcggggtcgcgtagccagaggatgagtagccgccgtcggcccgttcgcgctcggaccggcgcgaggccgtttttggccggtacagattgagccggtcgaggacggcgacgttgaactcgatctcggcgagccggtctctgaaggcgacgcggtgaaaggacagggctgcgggggggcgcccccccccccccccagctcaagggcgccgacaaggctggtctcgaagagaaggcaaaccggcacgcaggcccggcgccagtcattcacaagacgacgagcaaggtctcgactgaggggcttgtgcgtcgacgccagcagcccatcgtgcgtactcttctcggatggtagcactgactcttccatgtcgcgcccctgcagacgagcctgcgaccgctgatcgacaaccgcaacatccagtgcctgaacgaggcaccagagcacacgctcaagcacgccctagacggatcgggcttcctcgagtcggacgcggatgaggtgcgccgacctgccgagatcgccgactctttccctaaccggttgaccggccgatgacgactcttgaacccccccccccccccccccccccccccatccgccctcgcagcaactccttttgacgctcccgttccaccaaccgacgcgcctccgggcgcttgtcctcgtcgcctcggaggccgagaaagcgccccggcggctcaagctcttcatcaacagcccctcgctcggcttcgaccaagcctcgaccgatgcgcccgtccaagagtttgagctgacggccgcccaatgggccgagggcgcggtcaagctcgaactcaggctcgtcaagttccagcgggtcagcgagctctcggtctttgtcgtgtcgaacgtcggcgatgaggagacgaccgtcctcgaagggatcgacgtctttggcgagccgatggaggccggtagcaagggcccgctcgagaaggtcgacgatggacacgggcactaggtgggaccacggtcctccttctttgatggtcgcaggctgctgcgcttgatcttgcgcaaggaaagctgctaagggggaggagagggggcgactggaagggtcgagcggcctcgtgcggggagtctcggcttcctagcctcgccctctcgacagcctgcgccggcacgacctgggatgagaccttcagagacttacctctttcagagagcgagccaggaccaggtcgatggcgatgctgctggctgacaggaggccggaaagaggaggaggcgaggcggcggcgggaggcgggcggaacaggtcagccagcgccagcgggcccgattcccccgcccccccgaggacggcccacgacagcacggacaggaatgaccctcttgacactccgtctgctctcaggatcaattttggtcgtcgacaggcaggaggaggcaggcgacaaggcgaaggaggcggccgggcgcgcgggcgcagcagcccagcaacctgcgcctcgggaccagcgcccccccttggctagccggcctccgtctgattggatcgctcccttacaagttttggcaacctctcctggattgtagcatcccagcggtaccagtctcgcagcgatccaatgatatattgtgaaaaggatgttccggcccgcgcaggggctcccgccccagactcccctccggcccttttccggccatccccgcgaccggatcgccggcagactggttttacgcatctctcctggtcttgaccaaccagcctggcagagtcccgtgttgatcgcataagaatcggtaaaatcgcacgtactccttgctggggggcgactgggcgagtacgcatcggaaggcgagggagggctgctgcgcaaccctccccctctccctctcgaccctccgacgggcacccgacttgcctgacaccctccttgatctctgtttcccggccatggaccactcacttgaattctcgcgaccgccgctgccactccacgtttggtaggaggtcctcggccagctcgacgcgccttcgctcgcccgctcttccaagcaggtcaaccacgccttccgttggctgctcagcgaaccttcatttcccagcggctcccgctctcctggccggcgttgcctgcggagttctggctcgagatcttccaaaggtgtaggtacgccacgctgctcacagtcggcgggctcagcacatcctttcggcggctggcagccgaccctttgctcttgtcggcgcgctttctcgagccgaccgtcctccgggccgacccccatcgccgccatcgatgccaagcgtcctgtcatccttcaccctctcctgcaggaggatattgttggttcacgacggccgagcacagccgggacctcatcatcaacgtcgcaccgacgcgcacggacctgaccacgggcgagctcatgctggcggcctcgaggatggcgttgcgcgcggcagtctacaacgagaatgcgacattgcctccggtcacttgctgcgtcgtccagttctttgctggcgcgctcggcgtctactcggcgtctactcggcggacaacgcccagggtgtgacggtcagggacgttctccgtgtttactggatactcgtccaggccgtgcacgacgacaatcagctgcgttttgtcgccgcctctcggaaggctgcgtcgaccccgacgaccgagaccgacatggccgtctgggtcggcgagtcgaccggtttcgacgagaagcgctctaacgtcaatatcaccctccatgtcgctctcccgcgcttggtcaaggctgcggctgaggcgccgtctgatctgacaagatctaccggtacgtcgccctcaaacattgagcgtcatgccctttggtagattgatatcttccatgtctccttgtcgcagccaggaggagaagacgctcgccgcctgccggactcggtgtcgcggcgaactacgcgctccctctcgcccttatgaccagcctgctgacgctttcgtcgactgagcagggccaaagctgacgactttggcctctacgactctacgctggaacccgacgacggcgaagccacgagcgccgacatgtgaccagcggcccgtcgaggccaagccctcggttggtctcccggcgacctccgacgacgtcgttggcagccgtcccttctgcccatcatcttcctaccatatctatgtcgttttttggccgacttgcatcctgtgcgagttaggagtcgatcagaagcagcccttgtcgcatcagcgggcgaacgtcagccgagcgcctcctggcggtcgcagtgatcgccgggaccgagatgaaccggcagagacgacttggtcgcctctctcgcacgttgtcaagctgtcgagacggggccttacagagcagagcctcgcaagacggttttctctctttaatatcgaccagcacctccttctttctttgacttccctcgcccgccatgcccgctctccctctcgcctctgtcgccgtccgcggactgtcgccgcttcggccgcgcctgcctcacgcttgtctgccgctgcttctgccgccggtcgcctcacctcttcagcctgccggtcgtacgccgtccgagcttctgccgctctggcggtcccacacgacactcatcgctttgctgccgctactgaaccctcggccgggcgccggtcatacgccgatgtcttgccctcgtcggtgcgtcccccgagctcgccggatatctctcggtcccgtcctcctgcagcaggagctgactaacgcgcgagacggtgtggcaacgcgtttttgtatagagacaaaggaaggaaactctacaaaggaaaaggaggacggttatgaagacaagcttaaagctttgagctctcagtccggacgacggcgtcgacggcctttgcaaacgtcgcgacgttctttgcattgaggccggccatcgagatgcggccgttggtcgtcaggtagacgtggtggtcctcgacgagcgccttggtctgcttcgggttgagaccggtgaacgagaacattcctgcgaagggagaaggaggggagcccgtcagagctgagcggacgcatggggcgaagataaggaagaaggaggaggaggaggaaggaagacagtaaggaggacgcaaccgatctgctttgtgatgtgctcccagccgccgggcgtctcgagccgctcgagctcggtccggagcgccttgcgcatgtcaatgatccgtccgctcatcaccttgatctcggccttccactcgtcaaacattgccgggtcgttcaggatcgttgccatgacgcgcgcgccccaagcaggcggcgacgagatctcggcccgctggaggagggcgacctgcgacttgatgcgcttggcggcgtcggaggaggacgagacgatgtggagggcaccgacgcgctcgccgtagaggccggcgttctgcagtgcgcgacgacccaaacacggaagtcagccccagacgggcgcaggtaggcttagtcgacacgcctcgcgccagacagaccttggcaaaactctggcatgcgaggaacggcacgccggcctcctccatcagccggaccgacagagcgtccttttcaaggtcacccgaggcgaagccctggtaggccgagtcgaggaagacgtagtggttcttgcggacgatgacagcaatgagctccttccactggtcgggcgtcgggtcaacaccggtcggctgaaagcgaaagacaaagggggaaggagggggaggagggggtcagactccttagggtggaaggagggagggtcaggggacgatacgagaggtggagaggcaagccgacgggcgagctcgatcacaaggtgaggggcagcgtggcgggacggttcctcctcctagtcttcaccggcctctgacgggtatgcccctgaacgggtatgcccctgaacgaacgcatgtgccctccccgcttaagcgacatctgccctgggtgcgtgctcccgagtttggcgagccgctaccaccccgccccccggactgacgctcttccctcctagagcggcccacgataccctcgccatccaccagagactcacgttcttaagccgctgctcgtacgtgtcgacctggatctcgctcgccaggctccggtggccgccctggcggagcgtgtcgtgcaggccaaagctgttggaggtcgtggagagcgagacggacgggccggccgaggatggcgccgaggctgggatgaaggtcagaggggcggactggtgggcggaggagcaagagagtcagctagaggcggcggcggaacagatcgagtcgagagcgacggaccatggctcgggcgggtcggatggcagagaagatggcggttgggctgagcctgctggaggttgcgacgccgcgcgcttcggccatgctgccgccagctgctcctcctcccagcaaccccatctagccctcctagcaagactctgtgcccatgtcgcgccagctcctccttcgtccgccagccctcgtcgcatcaggcccatcacgaacgatgacgaccgacagtcggcctttctctgccgccgcggtcgtcgtcacccgacctccgccgcggacgacgacgacgacgacgcggaccctctcagccggcctcttctcgccgacgtcgcccttggccaccccattcggccggctcccagcgcgcgaagtgctcggctcttcttggttctcatctagcttctccttacgacgcggctactcattgcagcagcaccaccgccagcggccggacaaccggtcatcgtcgtcgagaccagaacaggaggatccgacgtcgtcgtctgccgaaccagcgcccgacaagctgcccttgacgcagcgaatcaaggccctgacgaagaaatatggttggtgggccgtcggcgtctacaccgtcctctcgctctttgactttggcatcgcgttcggcctagtctcgtatctcggcatggcccgcgtccagcggctcgagcggaccgtcaagcactgggtcaaggagcggaccggctggagctgggctgaggaggaggctgtccaggagctccaggaggtcgcaaagcagggcgagaaggagatccggaaaaagggctatgacagcagcttctgggctcaagtcgctatcgtccgtgtcatcccccctttccggtcatgcgcctgtccgctcgctcgctgaacctcctcgatatcctcaacacaggcctatggcatccacaagacgctcttcctccccttccggatcggtgcgacgaccgccatcctgcccaaggtgcgactcagagtctcctcgcaacccttctcgctcgcatcccgaccctcattgacccgctccctcccccttgcttgcacccactttcgctcccttccccggtctccacttcactcacgtcccatcgctcctgcagttcgtcaagtttatgacgaagcacggctgggccggccggggcgcgcggggcgtcaaggagaaggttcagcaggtcgttaaggaccgcaaggcgtgaagaagggcggtcgatctcatggatccattacgaagactgaggtgggggagggagcatgtcttcgaggagcgcaggcttggccgagaccagtgtctgtcctcggggaaggcccatctcctgcctggctggagaggtgcgaccgtcttggcccggctctcgctgttactctttcgctcgaggccacctctcctctacgcattgctccgttcaaatctcgcctcatcccgacggctttgccgtgctgcaagcctcgacgccgatctctttctctgccttcatcgggttcgccgggtccgcctcctctcaacccttactctcgcgtcctcgataagtctaagctcaggcgaatcagcacatcatcttcagcacagtccttcagacgtccttcaagtactccccccttcatctagaccgcggcggctgactagcgacgagtgagccgtcgagggttcgcgatgccgggtctggggattggacgaggatgcctttcttgatttggactcagcgtccgaatgaaactgcgtcgagctttttcgatgctcgcactgtcatcgatgcctagaacacgtcctgatcagcctgtcggaagttcggacgacgacattgcacgcaaggccgctaaggaagcgggtgcgcgagtgagagacgcccgcggcaggacgcctgctcgtatgccatcttgccctcgagccggtagcatacgcgagcgggtctgaccgaggtctcctctgtgtgagagagcatggacacacgcagcgccctcttcgcagaagccggtcgaaggcgaggggctcgctgcgcgcgccgcgcaccgccagtttctgcctccgacggcgcgaagagaaaaaacgggcggaggggcgaagctttcgaacttgaggcagccgtccctccttcaacaccaccaccaccaccaccctcttccctttttcctttctctttctccctctcttttgtaagcccgagatgtctgccggaaagctctacacccctgcccagcagtcgttcaagacgcgctcgatcgtcgccgtcgccgcctacgccggcctcgagctcgagtacccgtcgttcacgttcggcgagaccaacaagtcggaggagttccttgccaaggtccgttcctttcgtgctcccctctgctcgcagctgtgcagggctgacggccctcttctctctgcagttccccttcggcaagatccccgcccttgaggccgcctccggccttaacctctccgaggccaatgccattatggcctaccgtgagccctctccttccttctcgtacatcatctcccatcactcaagagagggagagccgcgaaagctctccctctcttctcacatgaagaaacacaagttatccctgtccaaatcatctatgtcgacaggcttttcctggagcgtggttgctcctctatctctgaaccctcccctcgccgctctttttttcacccgggccccttcctttgccgcccacctctttctcgctcctcatcgctgaccccctcttgctctctcgctaccagttgcctcggtcgctcccaactcgggtctcgtctcaaccgacgtcgaggtccaggccaagattgcccagtggctcaactttgctcagaccgagatctacgagcgcatctcgctcgcgaccggcatgttcaacaactacgtcccctttgtcaagcccgtcttccagaaccggatcgagaacgtccagaaggccctgaccgtcctcaacaaggagctcgagtccaagacgttcctcgttggcgaccgcatcacgcttgccgacatttcgctcgctggcgtcctcgccgacgccttctccaagttcctcggccccgaggaccagaagaagtttgccaacgtcgtccgcttcgagcagaccgtcatcaaccaccccaagatcgccaaggcgttcgagggtgtttcgctcgcgaccgaggttgccacctacacgcccccgaagaaggacgccccggccaaggcccccaaggctgaggctgcgcccaaggcccctaaggccaaggcccccaagcccgccgacgacgaggaggaggagccctcgttccaggacgccccggctgccaagaacccgctcgagctcctgcccaagcccgcgctcaacctcatcgacgtcaaggtcaagtactcgaacactgacaccaaggtctgtctgcctgctcatcggcccagatgagagccgctgctgacttgcttatgctccctcgtcagaccgagttcatcccctggttcttcgagcaggacctctcgggctactctgcccacaagatcgacttcaagtacaacgacgagctcacgctccccttcatggtgcgtcctgcaagctcttttgcccttccgcaagtgctgctccctgaccattgtccttcccctcctctctttcccctcctctgcagtcggccaaccagatcggtggcttcttcgcccggctcgaggcctcgcgcaagtacctgttcgcctcgatggtcgttctgggcaaggccaacgactcgatcatcaccggtgtcatcttcggccgtggtgactctgcccaggccctcatcgactgcgcccccgactgggagtcgtacgcgaccgcccccctcgacttttccaaggccgaggacaagaagttcttcgaggactcgctcacctgggacctccaggtcggcgacaaggccttcgccgacggcaagatcttcaagtaaaaaatcgcgcgcgcctacctgccgacttgccccactctttttgcttaccgcccccctctcctacccgccttggccccgcccgagctcgccatcctccagcacgagtcgggcgtgatgaaggtcgccaaccacttttttgaaaacggcatcgccttcttcaccaaaattgtcaacctctcgatctcgctcgtctgcgccaacggcgacagtgcgtccggacgtctaggcgtgaggcaccccttgacctgttcgtccggctgacctcctgccatccctgcctgcagtcgcaccctttgtcggccacaatgcctttatccgctggagcgccctccaggagattgcgaccgaggaggctgacggccgcaagcagatctggtcagagtgccacgtctccgaggactttgactgtgcgattcggacgctcaatcttggctacacgatccgctgggcgacctactcgaaccaggccttcgaggagggcgtctcgctttcggccgaggacgagatcaaccgctggcagaagtacgcctatggctgctcggagctcctgttcaacccaatccgctactggccgacgcggggcccgttcagcgcgcagatcctcaggtactttttcaagtcgaaaattcccgtcttcaacaagttttcggcctcaggctacatcttctcgtactacgccatctcgctctcgctcccgctctcgcttctcaactacattctcctcggccttttccgcgaggacctcgacccggcctacgtgccttcgtggaacgtcatcgtcggcatctggttcgtcttcaccggcaccgccccggtcgcgctcgccatcctccgctaccgcgtcggcgcggccggccttggcaaggcctttgtctcccaggtgcggcggccttcccctcgaagcccactaaatctgccgcccctcttgctgacgcctctttgcgccccttgcctgcgcagttcatgtggctgcccttcttcctcgtcttcttcggcggcctctcctatcacattgcgacggccctcgtctcgcacctgatcggttacaacatggtgcgccgcttcccttctgctgccttccgaattgcgctaatcctgtctcgcccgtcctgcaggcctggtcggcgactgagaaggacgtcaaggattcgaccgtctttgaggagctcccccgactcctccggcgcttctggccgatgctctccgtcatgctcgcgctcagcgtcggcatgggcatcgcgacgaccagcctcatcccgttcgagtggcagatctcggacccgttcgtcatggtcccgctcttctgcgtgacgataccgcacatcctctacatctttgtcctcaatcgtgagtgcctgccgccgtcgatgctcgccccccgccagaacgactggaagctgactcttccattgctccctcttgcctccagcgcacctcgtccgcttccgtttctagaaggtcggctggcctctttctcatcccttttgctttctctctcgcttcgacttgcttgaaatctcttctcttctcttactcgcctgttgccgcactttctgcccgtccctccaacctttgcttctcgtcgtcccgtaaacgtgcttcgcaccttttgcttgtctcccccgctccctccttcttgcccataattccgcctcacgacgcccaggtcacctgacgtctagacatgtcgctctcgctccttgctcgacgaccggaaaacccgattaggaggcgcaacgtctgcctccgccgtcgccagtgcctcaacgattcatccggcgctgcgcaccagcttcagctacgtgtagcttgccgcccccttgcccgtcaacctcgacatccatcgccgcctcgagcgacggcagactggctgactgttctcccgctggccattcggccgtctgctcaccccgtcccccgcgcccgctgctgaccgtccgcccgctcgtccggctgcccgcttaagcccttggctgccgccgattcgagaacacctccccgccgcgatcgcttcctcgaggtctcgcctcgtttgcgcgtccgggaccgacgccacccgccgccccttctcgaccggcgctttcaaagatgctcagaacaagcaagcgcgccaacaagtgcgggagctgcttgtgcagctgcccggctggccaagggccaatccggggagaaatcgacaagcaggtcgacgaggctcatgggccgaatccgcccgcgcagccggccggtgtgccaagctcgacccttcgagccagcgagagacctcctcttgagcctaccgacgtcgaccggcccatcaatctttccctcttcgtcgctcgcttcgtctctcgccttgctcgcttcgcccgtcgcctgctccgccctgcagtctctctcgctcgctgcctgcctcccgactagaccgctcataaagaccgccgaccttacacctgcccgctcctccctcgacatgtcctttaagctcgccctcgtcgcccttctggccacggccggcctctcgcacgcccagagcgttcagctcgcccggagctacactggcgagcagttcctgaacggctttggtgaggctctgtttttttgccagtctcgtgctcagctgaggccgcagtcggctccggctgactatgacgctcgtcgccttcccggggtgctcagacttcttcaccgagaacgatccgacgaatggctacgtcaattacgtctcgcaggctgaggcgagctcgaccaacatcgtccggacgaacgcatcgtacttcacgatggcggtcgacacgactacggcgacggcgaccggccggggccgcaactctgtccggctcgtcagcaaggactcgtttgccgacggcgtctacgtcctcgatgtcgaccacatccccgtcggctgcggtacttggcccgccttctggacgacgacgcgctcgggctggcccaagtcacttccttcctctgccgcttcttcgcaggacgtcgagactgacgcaaccggcttcccctcttcccccctgctccgtccttcctactccgtctgctcgctatccagaggtggcgagattgacgtgatcgagggttacaacagcctgccgccaccaacgtcggcctcttacgaggccaccttcgcgtcggctaacctgccctcgctgccgaaccagctcaactacacgagcaacactgcttcgctccatacggtctcgacgtgcgcgctccggcagagcggcctgcagacgggcacgaccgagacaaccgtctgcgacgcggccgccaacatgaactctgtgcgtctgtcggctgcggctggccttggcctcatcgtgcgtcgcctgacactgcttctcaatcgcttccagggctgcggtatcgacctcggtcccaacactgccggtaacggctggaattcgggcggcggcggcctctacgtcctctggcgtgatacccagcgctcgggctcgatcacggtctacgccttcccccggtcgtcaaacgcaatcccgggcgacctgctcgccgagaacggctcggtactgtccccgcgcgactggaccgtcaccccggccgccaacttcagcatcccccagtgcgccaactcgacgttcaactcgcacgccgtcgtcatcaacacggccctctgtggcgaccttgccggcaacgtctggggcgcgagcggctgcaacgtcgcctcgaccacttgcgcccaattcgtcaaagagaacgctgccgccttccaggacgcctactggggcatccgctcgctcaaaatctacacggttgacggcaacaccgccatcgtcgaggcctcggccggtctcccgtcagtcatcgctcgggtctcttttcgcatctcagctcacctgctgacatgcctctgccgcaaggtcgcgatctctctcggtcaatctcgctgccttcgggattgcagtcactgccggtctcggattcctgctgctctagacccttgctggaagtccttcctctcttccgactccatctcatcgcgcattcggcttgttctacccttgcccacactgctcgcagtcctcttagatgcaccctgtctcctgaacaacggatccatcccggaaggttgttgcatcaggtttagggtcgccgtcagctgctgaggcaatcggcagggcgtgggcgcgcgcgccaaccccttcgacccatcctttgctcgcctcgccgtactctagatcagcatgggcatgatatgagaaggcggcagggagggtgcaaagcgggtgtaggaagcaagtcgatagagcaatctaaagcggacaacggaacaaagggggtgccggcgcggccaaggcaagcgcagacaaagcaaacaagcaacagaccaagagcagaaagaggaaagaagcacttcagaaccgcagacgagcgacgtcagctggagaaagggaaggcagcagccgagtcagcatgcggtcaagaaaacgttgaaagcggcaaggacaaacggttcaggacaaagacaaagaggatgtgggagacggccgtggtcaggagcggcgcgatgatgaaggggctctcgatccgccactcgaacgggatgagaccggtcgacgcaacggcggcgccggcgctacccggccgcccctgctgctgccgcgccgcatgccgcgcccgccgctgcccagggcggaggcatgatgggtaacatcatgtcaacggcggccggtgttgccgttggctcgaccgtcggccacggtctctcgagcatgtgcgtgggcgtcttgccctactcagcccttgccagcgcagcgtcacgcaacttgctgacttaaacccattcctcactgtcactgcctcgctcaggctctttggcggcggctcgcaggctcaggctcaggacgtccccgccccggtcgccgcccaggccgccaaccagattgccgaccagggcgcccagtgcgccgttcaggccaagtcgttcacccagtgcctcgacgcgacgggttccgacatgggctcgtgcgcttactactttggtgcgtcctttgcgaagcccgagcttggcgaccgacgtcgctgcgactctgcgctgaccctcgcgcgccgaccttccctcttacctgccatagacgccctcaaggcttgccaggccgccgccgcccagtactaagcggccgctttgtcggatggaaaatgtcttaataacctgctgttcgcgccgaccggccgcactgacggtgcatgcgggctcagccgataggatttgttctgctggccttgaagaacgacgatgcggtgctctctgcgagcttcctctctaaaaaaatttggccggagaaaatcctcttgtgcgagcgaagccagccttgcgagctgcccgggcggaaccgcggagtggaggccaagcgtacgtgcttcaacgtcagtcgtccgcagcggagccgcccgtctctcgcttgacgacctcgcttcgccaaccttctagcctgcccgtcgaccgccctttctaccttcaaccacatctcccattcagacctcacacgaaatgctcctcgactccaaggaccgcgcgcggaccaacgcactgctcgccaagggcgaaagccggggcgttgcagacgagaccgaggcgagtagcctgccctccctctcgacctttcctcgccagttcccgggccaggctgcctgcctgaagatcgatctcaagagctgactcgcttgtgatgttctcctggcatacccctctcgcatcgaatgacgacgcagacttctccgccggcctacgataacctcgcctcctcgagctcgagctcagcggcggaaggtaccggagccagctcctccccgtcggccggacctttggcctcgaaccggccagcgtcaacctcgccgctcgcctctgcccctcactcgtctcacgtttccgtctacagccacaacggcgccgtcaaggcggcgcatattctcgacctcggcgtccccgtctcgccggcgctcctccgggcgcagcagcagcagcagtcggaatcgtcatcatcccctcggccagaggaagtcgacgccctcagccgctggcccaacggctactgggcgtcgcagaacggtagcgtcacggtatcggttggcgtccgaggccgagaggtcgccgatagcgcgctcgagcaggcctacctcgtcgacgcgggcaagaagggcgaggagagggtgcggatcgttgcttacagcgagaacggtaacgtcaagtgtgctatcgtacgtagcatgatctcaaggagcgtcggaatacctctgaccgttccttccctactccaggttgagcgctcgccggcatcgacaccgttcaccgtccgcgcaaagtccctcaacggctcggtcgagctcattttgcccgcctcgttccacggcccgctcgcgctccagacggaccacggtatgatccggctctccgacggcgtcaaagcgcgcttcacgccgctcgtcgacggctcgggctttgtcggcgacatcgcagactgggacggcgatgccgagcaggccgaggccgagggctgggactctgcccttggagccagcaagaacggctctgtgcgttgaccttctcctcggtctgctggaagtctcacgaagctgacatgtgacctccccttcaatgaacaggttcgggtcaagttccaggaggaagtcgaggaggaggcaagccggccaggattctttgcgaagcttggcctctttgggtcgaagtgaaaatgtttcccagctgtcagattgatgtttcctgtgccctgctcaatatccctgccttgcttgtgcgagaaagaccatcttgctgacggcgtcgaggcaagtagtgcgactccccaacgaggccgctgactgactgcgcggcgcaagccacgccgtcagctatagctcagctgcaagcccagccctcttcctcgctcagcaccaccacctccttctctgtcactctccccatgcccccgtcgcgcagtcgacatccgtaccggccagttgtctcgggcgtgacctcgccagccgcctcgtcagggccgaccatctcggtcctcccggcgagccagcgcgtccggtcgacgggcattggcgtgctctcgctcggcccggctctctcgagcctcaatagcctgcccatcgtcagcctcgctcggcgaaagaagatctggacctttgcagcccttggcgctctgctcgtctttctgcttgcgtgagtctctggtgaaggaaggcacgtcggtgatggccaggagggctgatggtctgcgccgcgacgccgacctgaaacttgtccttctccagcgtcgctcgtacccatccgaggaccgccttctcgcggcactattcgaatccatcggacgcctacgacgagccgcatgagccggtcgagctctcgtacaacacgagcaaccccttccagacgcgctatagcccgccggcgaccggcgaccggaggctcgctggccggaggaacgagcctttgatggagcagctgatgctaaaactccgcggcaaggagcctctcgtcaaggaggcctaccaggacagcctcgaggccgacgacgggcgtgggagtggccgctcgaagacgcatccgcacggccgcaaggccgaggatttcggctggctccaggacaggaccatcctgctgctcggcgactcgatcgaccgctaccaccttcgtgcgtaaggcttatccatcgagcagagtgcgtcgaagctgacctcaccttgcgctctcgccgctcgtagtccacctctgccagttccttcagccagagtcgccgttgcatccgctaccttggccggacgcgcagccgcgcgattacgtctcggtctacacacctacatcagacgggacgccctacccgtctcggatcgccgacattgaggttgagctcgccaagctgcatcgcggtggcgagccttacggtagcgagcagagcagagtctggtcctgctcaatcgacaatcgctggggcggcctgaatgccctcgtcgtctggggtttcctgaacggcatggacgacggcgtcacgacgccaggtgtcttcccttacccgccttcggaggacaacggttcggtcggcaagaagctcatcggcgagccaacctatgccgaggcgtcgccgatgccattcggcgaccgggcgttttggcctgtcgagtgagccttcgtcggttcgcaatgttgacagagctcgggacggcgctgacgacaacgctcctcctcttacaggagcgcacacttcaacccgccgctcagctctgaagatcgctatgagcagctctttggcccgatcctcaaaagcctcggccgcgagacggtcgacatggtcgaactcggcgtcggtcgtgagtcaaacattgtagttgtgcaagcgtcttcgtgatcgtgttgactctatacgcactacagcctgggatctcggcatgttcaaggtcagtgacgacggctcacggaccgaagctacttctggttcgagagctgacgatccgcctcgcttgcttacgcctgcagacgcaagacacgatgtcgatcaagcgctcgccgctgacgcataacacgaacgactcctacattgactcactcggtgccgaactgacggccgagccgctctcgtcggcccgtctcgcctggttctcgggccgtctccgagcgctgcgcgacttccttaccgcgcggtacccaggccggctccgcgtgcgggggatgcacctgacgccgcagtggtacaactacccctgggtgtttgagagcgtccgaatccgccagatccagcgggcgacggccgacgtcgtcggcgacgacccgctccagggcggcctcagtggctgggagtcagtcatcgagtcgaaaggcgagtggctcgaccacattcacccgggaccgatccccgccagctggatctgggccgacatggctctgaacggtcagtcgcgtcgaccgctgccgggccacctcgttcgtcgagctgacagcctactctcacacttccagacctcaagcgcatcgtcacctcgagtcgaatttgagcagcccctttcgcagattagatgactatcccacggcaggcgcttttcttctcgtcggccgactccttccagtgcccatctcaggctcctctggggggggggaggggactgaaggcgtcgcacctgaagctccttcgcaaggtagatgctctgctcaatcccccacgactgccattcgccttcttggttcttctcgccgccctcggcccagtcgctcgccgagacgcggtagaagagcggccggtcctcgccccaggcctgccggacggcgcgcgtcacctcgagcgggaagcggacgcggttcgcgagcgagccgccgtagcggtccgtccgcttgttggagaggggcgagcagaacgagtggaggaagtagcctggtagagcgggggggagatgtcttttgtcagccgcgagcctacggaagaacgagaggttcaggtcggaccatgcgcgccgtggatctgcgagaacccacaggaagagggtcagaaacctcaagccgttagagggagccaagacgaagaggacgcgcacctcgataaagtcgaagccgatctgctttgcgcgctcgacggcgtcaacgtaggcctgcaggaggccggcgaggtactcatcggtcgcctcctttggctcgccgtagggctctgcgaacgggatcgccgagggtgcccagactggcgacaaagcgaggagcagggagcgcgtgtcagtctggccaagtcgcaagtcagcgagacgtcggtcaaagaagagggctggctcaccgttgtcgggccaaccgccaagctcctccggaacgaccctgccgcccttctcgcccgagaccgccacccaaggcgcggccgtgctcgccttgcggcctgcgtgcccgagctggacgccgatgagcgtcccgagcccatggacaaagtcgacggcgcgcttggccggggggatctgggcgtcggaccagagaccgaggtcttcggggcagatgcgaccttcgggtacgacggccctgtttgaccaaggatggggttgcacgagcgtcaggggggaatatagagtgggagaggagaaaggagacgacgaacgacgcctcgacgacgatcgcaccgagcccgcgcgcggccatcgcgcccaggtggacaaagtgccagtctgtcatgctgccctcgtcggacgagtactggcacatgggcgaagcccagatgcggttctgtcgttggcgaaaaagcgaggacgagctgtcagctgggaggcgaggaccggtaggcacggccggagagggagctcgcaccttgaacgtcgtcttgcggatcgtcagcggctcaaacatcttgatgccctggatgccgccctttgcttcattatcggcggcaagaagcgagccgacggcgggcgtgttgagcggaagaaactctgttcgagcgggcgaggcagagtggtcaggaggagggagggagggaaaggtgtatgcgctcgctcgcgcagtaagcagcgaagagtaaggagggacggacggtggtagcctgggacgccctcgttgcgggcgatgctcgcggaggcggttccgttcagcttctggagagtcatatctgtgcgaagtacgagtctgtctgaaggggttgatgctgttggagaggaagacgaggaggtcgcccttttgaaggtgccgcacgcgtcccgccggcgtgggccgaaggctgccccgtcagcccagcctgctgcccgacccggcccgagccgacgctgacaactgtgcatttgccgaacagagtggcgctcggaatccccgcgctgccgaccgacaacctgcgtgcatgctcgctcgctcgcttgctagcttgcttggccgcgctcgtcagccggcaggtctgccgaacgacgaccgctcggcacggccaagcccggaacttccgacccgcgcacgctcaggtcgagtcaatgatgcatccatggcccgtgtcagagaggcagggctgagctctacgaggggtgagggcaaggcgtttgatctagccggccaggggcggccggtcgacacgccgtctaagtgaggaagggcgggtcgcgctaaaggggttgcggacaagcgaaaggaaagggaagtctcagagccgggggtcaatctcgaggccgaggttcttgaggcccatctgagaaggggcaaaggaggagggaggggaggtcagcgaccggccatcgcccagacggtagagaaagaggaaagaaaggcgcaccatgccgacggccttgcggctaagcgccggtagcttcgggcagccgaggacctcgacggcgtacgtcgtggcaatctggatgaggcgctgcttgttcttgatcatgccgttgctgcgaatgggagcggaagggaggtaggtgtcagcgactcgatcaaagagaagggggggaaggggcgcgaaagggaggccaacgcactagtacccaaggtgagccgacgacgcctggttcttcttgtcctgctcaacccgacccatggccgccttcatgacctcggtcatctcgccgagctgagcggggaccggcgactgcttgagcgggagcttgcgcatctgcggcttgtgcaggaacggcagctcgtcctcggtcaggatgagggagccccggccttcggcgccggcacgggcggtccggccgagccggtggacgtattgctgcagacgcgaaggggagagcgtcagcctgagcgtctcaagcgagagaagggaaggggcgcaaggggcggatgcgcgcgcacctcagggttcatcggcacgccgacctggaggacgtaaccgacgcccttgaagtccatcccgcgggcggtgacgtcggacgaaaagaggatgccgctctggcagaccttgaaggccgcgctcgaccgctcgcgggccggctggctcatccgactctggatctcccacgtgttgccgagcgtcagctgctgggccgcctcgtagaggatcgccgtcccgcgcgcggtcggcaaaaagaccataatcttgtacgtcgtcgggttggccgcgatctcttcggcaatctttgcgagcgccgccccgtagatttgctcccaggggacgacgagcgtgtcctgcgggacgcgctcgtgtgtattttcgtcctcgggccggatggccgagaggtgcttgtaggacgggaggagggcgacgctgacaacgtccttgagcgaggccgggacggtcgcgctgaagaggagcgactggcgcgggtgcgtcgcccggttcggcaggccgcggcagatcttgacgatctcgggcttaaagccggcgtcgaggagggtgtcgccttcgtcgaggataaagtgccggacgccggcgagcttggtcgagagcccaaagttggtgatgaggtcgttgagccggccgggcgtgccaacgaggatgtcgcagccgccggcgaggttccggacgtccgccttgacgttagtttggccgtagacggtgacgcacttgaagccagcagggaggatgccctgggcctcgacggcaatctgcgaggcaagctcgcgcgtcggtgagatgatgaggcacgagatcatgccgggcgcccgggccgggccgcggatgagcgagtcgaccgtcggggcgaggaaggccatcgtcttacccgtgccggtcttggcctggggcggcaaaagaggatagagcaatgaggaggtgggggtgagtcagccgagtgggttgcgtacgcttaagagggtgcgcagcaaggagcgggacggacttgggcaaggacgtcgtggccctggaggaggtaagggagcgtgagcgcctggacctcggagcacgacgcgtgcttgatgttggcgagcaggctcgggtggagcggaaagtcggcaaagcgcttgtcggtgaacttgatcacgtcgttcggcgcaccgccggcagcggccgcgggcggcgtcggggcggtgacggagggcgcgaagatgggcgtcggtgctgggtgggcggctggcattgcctggccgggcatccggagcggagcctgcttctgcccctgctgctgctggcgaggcgggccacgttgggcctgcgccgggccaccgacaggagggaggacgccgtcggtcggccgggcgggtcctcgcggtccaccaccacgtccgcgtccgccaccgccgccgcctccgccgcgtccacggccgccaccaccgccacggccaccacggccgcgaccgccgcctgaagacgagatgttgttggggttgagcatgcttgaagggagagagggttggtgggggtggagggatccggttgctgcgagcgcgttggtttcgagaggcggaaggagcgcggacagtctgcgaagggtttcgacgcgagaggatcggcgagggaggaagaagagggaattggcttgcgaaagggaggcaggcgaggtagaggagagcgagtcggttttgggcagacggtcggtcgggctgaggcgacggttcgggccaaggggcgaagggtttcgagcggccgtggagtccccatgctcggatcgagcagttacgctctggtgttacttctgttacaccggcagcctgttacgcgctcgtctcagcatcagcctccctcccctccctctccctccctccctacctcccactgccgtcccgctctggcctgaccgacactcagtgactacctctaccgctgaccagggcttgtctctcctcgactcgtcctctctcgctttgtcctctctcgctccgtcttgctcttgggtctcgtgctctttcgctctgtcttctcttctggtctcgctcgctctgtctcgatggctcccttccgctgcatctcgtctgctctctgctgcaagtgtgtccccgtcgaagcggcaagggcctcatcgcgcaccttactcgtgcaccggcgtacaaggagacttcagcgccgcagggggccgtcgggcggaccagcgactccaccaagaagcactcagatgacgacggagcaaccttatgcgggtgaggcgtcgaggtacgaagcatgcgagagcgagcaaagggagaggaggtggcgctttaaacgaatggacagaaggatccagacgcggccgtcgaggtctatcaaaaaggggggttggggggagagggtcgggagggaggaggcggagggagacaaagtcgaggcgatacatcgaacaggagacattacggatgaagtgcaagggctttgaagtagtgtgaaggggggcgaggaggagagcaagcgaacggaagggaaggaccggggcgagggtggaaacatcgccggccggtcagaccagacgccgcttactgagggcgggacgggtgacgagcgagggtagcgccggtctggctgagctgagcgctgccgaaccgctgctgctcctgggcgttcatcgagaccttgttcttgccgaggccgacgcgccgggcggtccggttgaggaacgacgtccggttcgagtagagcgactcgtggcgcgagacggtccgctgaaggcctccgccctcgacgccagtctcgggcagcttagcgagcgcccgcttgcggagccaagcaatgacggtgtacttcatagcgaacttgacgaggtcgagcgggaagtaccagacgactgcgagagagaagagggggtaagagtcagctagagaaagcaagaaggaggcgagagaagcagggacgcactgttccagacccagacgatgccgatccagccgccctcgatggccttgacgtcggtgaagccccagttggcaaaagcggcgatgatcgacgagatgagctgggcgaggcagaaggcggccatgagggccgtcgacgggcgctccatccacgaccagccgtgcgaccgcgtgacaaagatgagggcctgcgagatgatggcgacctggaggtagatgaccatgtggcccttctggtcgttgacgtcctccttggcgatcggggtaacgccgaaggtcgactcgaagaagttggtgtcgtgcatgacgatgaaaaggacgacggtcgagagagtgaggtagaggccgtaggcgatggcgtacgagaagatctcggcgaggtcccagtggtcgggcgtcatcgagggcaggacgcggtcgagcgagagcgtcatgatcgtgccgtcgttaaggacggcgatgatgagaaccatgaacggcgggaagttgaacttccaggcaaaggcgaggacggcaaagccgacgacaatccggatcgtgacggcacaggcgtagatggcgtagttgcgcatgcgctggaagatgacgcgcgactggcggatggcgtggacgatggtcgacagtccgggctcggtgaggacaatgtcggcggcgccacgggcagcgtcggtcgcaccctcgacggcgatgccgacgttggcgcgcgagagagccggggcgtcgttggcgccgtcaccagtcatggcgcagaggtggccgaggccctggatccgcttgacaatctcgaacttgtgctcggggaagacgccagcgaagccgtcggcgtccatgatcatctcgtcgaggttggcgtacttgccgccgacagggggtccatccttgaggatcttggccgggtacatgtggtcgccgagaccaagccggcggccagtctccttggcaatggcgagctggtcgccggtgaccatcttgaccttgacgccgagggcctgggcgtcgtcgatcgtctgcttggtgtcgtcacgcggggggtcgaagatggcgaggagaccgatgagctcgaatccagtgccctcggcgcccttctcgtgcgagttgttcttgacctcctcggaggcaatggcgagagcgcggagaccacggcgggcaaactcctcgacgtccttctcgagctggtcctccatgtcggacgtcttgttgcgcgagcagatgtcgatgatgatgccggtcatgcccttggtgacacgcttgacgttgccagacgagagctcaatgtaggtggcctcagtccgcttgtcaacagggttgaaggggacgaagtcgaggagcttgacgccgtcgcgggcgacctcggggccaccggcgcactcgacgacgcagccgtcgatggcgtcctggttctcggtacgcgaagcgtaggcggcaagcttcatgacggtgatggcgtcaaaggcggcgtacgtcttgacctcgttcttgtcgatcgtaagcttgttggtcgtgagcgtgccagtcttgtcagagcagaggatagtgacaccagcaagctcctcgatggccgtgatacgcgtgacgatagccttgtgcttggcgagctgctgggcaccgacagccatcgtgaccgagaggacggtcggcatggcgatcgggataccaccaatcaggaggacgaggatgttgtcgagaccggtccggtacgagtagcggaagtcggcgtagaggatgaggatctcgaggacgacaaagatacctggaggcggacgaggaggataaggtcagtcgattgctcttcgcggcgagagcaggagggagacaaaccaatcgaaaccatgcagaagagaccgatcttggcgaggacagcctggaggtgaccggtcgagtcgttgtcggcgccgacgagggtagcggcgcggccgaagaacgtgttggcgccggtcgagatgatgatagcctcggcctcgccgtgcttgcaggtcgagcccgagaagcactcgtcgccctccttcttgttgacggggagcgactcgccggtaagggcggcctggtccatcgagatgtcgatcgactcggtaagacggcagtcagaagggcagacgtcgccgtgcttgaacgagacgaggtcaccgggaacgagggtagcagactgaagaagaagaaaggcgagtcagtgaggggaaccgatgcagaggcaagatgaggaagagaaggcgacgcacgtcaatctcggcccacttgccattccgcttgaccttggccttgggcgcgagcgagtccatgagagccttgacggcgtttccggcgttgcgctcctcgacaaaaccaatggtcgagttgatctagcgagcgcaagatgaaggtcagtcggcgggcgattctcagcgcgagaaagagcaggaggggaaaggacggcactcacgagcagtagcaggacgataccgacaaagtcctgccagtccggaggccggccgccaccgttcgagagggcgatggcgacgagcgcagcaccctccatgacccacgacagcgggttccacatgaaggagaggaactgaaggaaggcgctgcgaagcgacaagaatgagattaggtcagccgcctgctgagaagggcgagcgagtgcgcagagggacgacatacttctccttggtctcagggagcttgttggggccgaagacgtcaagccgccgggccgcctcctcctccgtcagaccgttctcgtcgcacctgaaaatagacgccgaggggcgttggtcagcggttcgtcgatgacgaaagaagacgaccaggaagcagaggcgcactggagaagctggaagacctcctccatgacgacgtgctcgatgtcgaccttgtccttgtcgtacaggtcctcaatcgtgaagttgatctgagacggcgggaagaagggtcagccgggggaagcgggcaagccagatgaagcgtgaggaaaggacgacggacggtgtcgagagcgacacgagcatgctggtctccgtcagactctgcgagaggagagagaaaaagagggcgtcaacgtcggtcgctcgcttgatcggctggatggctcggagagaaagaggtgggagggcggcggcggcgtgggcggggagaaaaaaagaaaatgtcgtcgacgcttgggttcgtctcggagcggccggattgggcaaggcgaggaaaagagggggcggcgacagcgggcgaaagacgggacgcactgtgctccatgtccttgtactctcgcttcttcttctcttcggcgacgacaggcgcaaccggctcctcggccgctagaggagagaaggaaggaccggttggggcagaggacgataacgggcgcggcggagggtgaaaacagggggggagggctcggcgtcagcgacctggttggctccttcgaaacgacgcccccctatcccccccgcctcctattcttcctcgtctgccactcgccatttccaccgacccatccgcagaagcgccaggtcaagccgatcttgatgtccgcacggccggcctcccggcgtccccaaggctcaacttcaacgcacacgctcggctcgttgcttcggtccggggttccagctctgatgacgtcctctgctcacgacgaacattagtctacttctcttcaccatcccgacaaaactgttatcggccctttcgctgactcactgtgaagtgcttgccatctgtcctcttcaccagccagcccagacgatacatgctgaagagggtgcgtcgtggcggtttggcgcgcgcgtcgccgcccgccagcgcctcctccgcctacgtaaacccatcgcaccctcgacattgtatccgagcaggatccgcgccgcgaatagaccgctgtcggggaggtgatcaagttcgctttccggctcgtccttggtccgctctgggatttttcggtcccttccctcatcttgggaattgtcccgctttctctcggatcggcattaacacctatgccatcgtgcctcgtctcccagctttgtttctacgagcaactggacctgaaaactttgctggcgttgtctctcactcagcgctttttcacgcttgagcaaaacagcggccgtcaaatattatcttgctcgggagtttctcgcttacttgccattgtatcgatccccaaacactttcgtagcctgcagcaaataatggcctccgagagcgcctttaccagctaggcggtactcttcgtcgacgagattatggccacgatcgaggctccaactgccgcagccgtctaggaaggaggttaacactgttgattgagctcaggcagggccttgctggggggcagggcagtcgggtgaacgcttcatatatgaccaccgagaacgggatgttgacgaggctgacgagccgtcgccgttgccgagccaaaggtccgagccagtaccaccgagagcggagggcgcgtccccgaacaacaacgaggaagaaacggaagtagacagctgcaagaaggccaaacagcagacaataggacatggtcgtagagatctgaacgagagcaagtcgaaagcagtcgtctgggccagcaagatttgatgatgagggcgccttcaaagggcaagtcggaagggaggcgaggggtagggtggggacagacgttcagaacgcacaggctaagctgcaaagcggaaggttgtccgtgtcatttcgtggccctgcaagccggacggacataagcagcaattgcgagatacgacacgctcggcgaggctggcgatactcgccgcagatctactcccgaccctgagaaacgcgtgaccctgagaacctctgagctcggctcccggcgggtcgtccctggggagcactgagaccgtcgcttcatcatccctcatgagacagcagctcctctgcgcttgacgaagacaattaaaaacgctctggctgcccacactgtgctggcgacgggctttcagtctgttagtgtcttcaacctatcgggctccaggaacgggggttgggcagggtgcaacgcttaccccggctacgggcccactgccagagggttatttctgtcccctgcacacttaacactggagagcggttgggctacaaggtttttggcacaaagtagggcatctaagcattacaagagcccagacactctctagtcatcaggcatccctttatcaaaaggctggtccattcgccagagctgcttgcgtgttgattgactgccgagcgctctgaaaggcgcgccaaagctctctaaggtcgagagaaaacactggcagacatgccgctcgcagtcagtaccgggtgccaccgaccatcaagggcgttgccggtagcgcactcaacatcctgtgaaatcttttccatgatgtgcttgacgcttgcagcggcgtcgaggtaggtaggcgacggagcgctgacgccgacgggctcgacgaccgcgagctggtgagcgcggttttgaggggcaaagaaatgacttcagtcatctgcgtccgaaaaaaaacataagccaaatcgcgcattattgccatgaaacacacgacaatcaggtgcatcttgaatgtcggtcttctacagctcgtgctcgaacagcttgcgcttcgcccggctttgcattcagtccctgtaggccacagctcagtgagagaagctagtgagagcggaacgtctcccaggtcatgccggtctcctgcaagatgacgatgaggtcagtcttcccccagcaccggaaagagtaaaggcaacgcacgtcaggcgactgacagtatcgatgcgctgcaaatcgtcagtcggaggtcccatagcaacactagagcagctagcttgcgcacctcgccaggcgttggcatagccgtcggccccgatgatgaactcctgccaactcgcgcacgagtaggagggtccggtcggtgccagcgacactgtatgaccggccctccggcgacatggcagccgccactatgaactcgacgagctcctggtgtaactagtcgtcctgagaaatcagggtcaaagaggaatcagactgtgcagagtgggaaaaggaaagggagacgcgcgttgaggatgatggacgcggtcatcatcggtcaagcccgtatgcatcgcgacccaacgcgcactagctcgacagcgaaagcgcccacgtcggtgaagatggcgagaacagtcttgtacctggtcgtccagccgttcttgtcgttgccgagggcgacgttttagtggtcttcgagcggggccatgaccttggccgagggtggcgtcgacgatcgatgcgatcctgaagtgtcgggtacgtctcggtaaccatttttggaatagacggtaggcgataagcgcagtcggccgtcagctaatgtgctgctagagtcggattggaaggccaggcaacgcactgcagaagcccttgtccgatattcggtggcctatgcgccagccgctgatgcccgaggccgaggcagtagagcgcatagccgtcgaggcgccgccgacgccgctcgtccgccaaagaccgagcttggcggcagcttcgcagattctgcgcatgttgtgatctacgttgagttggccgtcgtggtcgtccagcgcgatcttgatgaagatgcctttaattgattgcgccgccccggatgcggctgtaggccgccaggatgcggtccagagcagcctctatattgttgaatgacggaagctccctcgctcggtagctaacccttctcggccgtgacgtggaatacctcgcacaggccctcaggcagccgggcaaagacaaagggcgcaacaaggtgcggctcgatcgagcgagctaccgacgggccaagaagacatgcagggtttcaacctagcactggtctccgagaaagagagttcaagcgggggctctcaagcaagacgtacaggtaaatggggcgtgtgcagcgtacgaagccgggtcggtggcccagaggctgccgacgaggctgcggtcgagagcggagcgagccggaaagagcgacgacaagactgccgggtcagtgatcgaagccctcagtggacgaggcgagtgcggacgtacgtcgatcaaagttccgtccaaagcagtccaaacagcatctatagtacggtcaacgcgaggggaggcagaaaagatgggtcttgatagagatcaggcaggggcggtctacgcgcctgctcaagcagatgctgctcgcgcccttagaccgacgctagcttggccctaagccggcgcgcacgcctgtctgacaccgctgcccaaatccccatttgctcccgatcactgacattcatgccttcagccttctgcatctatcttcgttgttgtcccatgtaagccagacactgtcgccaaacacgctcaaccaagctgtcaggccgcaaccgcccaacaatctgacagaacccttaaagtccccctcctcagactcagcgggcaaaagcgggcacgtaaacagaactggggaccagtcctcgtccaggtagacgggacagattaagtaagccctcagcgtaccctgaagggcgcgctgaaatgaaagcgctcacgtcgtgagtctgctgggccacgcaaaaagggcgacgcatgccatacttctttgccgttgcttattgagacccgcaggcgaaacaaaaagaagacgagagggagtcaggcagcaagcagctcacaaggcgaaccaggacgagggcggaggtagacgtacaagtaggccgtctcgacgtccatctggtggacctcccagtcgcacccgactgaagccctgcgcgacgaaccgaccttatagcggaccgtcactccttgtgcgtccttcttctccgcgagcacgtctcggcagccgacgatgttgagctcgtgctcctgaacctgggcaccgaccgacgaggccgtgtgctcggtctggccgaccgtccgggtgtccttgtgctgcgacttgaggccctcgagcaggtcgcgcttctcgggctccatctcggcatggacctgctcacctcgtcgctcgttgcataagaccggatgactgacagaagtcagttctcctccgggtatcagcctgacccagagtgtcagcgaagctcatcggagcccggtccacctcgagtcggggggggggagggtcagccgacagacgtcagcccgttctcgtcgagcaccctcttccctcaaccaacagccctgcccctgttccggccattgacaatccgaagcgccgctcgcaaggcacagcagaccttggccagcgttcgcgctgccctgaagaaccgaggaccgctttgtctggcggtcagccgctgtcggctggcgactcgccgaccttgtgcgcgaagagcggtggtccgacaacctccagcctcagccctccgagggcaaaccggcagccgacctcggcgacaaccgacacggccgagaatagtggcaatgtcgtccggtatcggccgtccgccaggccgccttgctgttgcggtcgctcgggcgaaagggacgctagagtgatctccgcacgcaggtcgggagggaggccggcagtcgacgtgctcgagccgagccaagcctgccgtccctgcatgccctccgcacgggacgcccgctgcacgacacatcctgttgacatgctggccctgtgcggcctgccgcggtacgaggtcctaccgctcgaaggttgagatgacggtcggcgagaggacgctgtcgtgctagcgaggggcaacgcagcgccggctcctctctccctttgaccagctggtgtccgcttttagactgacctttcgttgccttgccccgctcgcccacccctccgctcaccctgattgaccccggctgggagatggcgcgtccgacgtaacttaccgagattgcgccttatcgcctgcttgccctgtgctgggcagcagcggcagaagggcagagctacaagacagaagagcaggagcgcagaagacatctcgatcccgacgcactcattcgctcctccctttctctctctctctcggactttagatctgccctttcctctcggctcgctatgtgtgcgtgtctgtctggcctcacaagcggcagtcatgcgcagccggctcactctccctcctcttgccctctaccttccaacgccccagcgaccatcaacgcctatcaggcttccggcgcccccgaccaaggccatgttctcgcgcccgaatcgtccttgcacgagatctcgttctctgaactcgacgagaagcgcggcaacgaaaagctcgacgacgaggtcggctgggggagcgccgccgtctcagtcgacgacagcgacggccggatgccgaccgacgaggagcgctcgacgctcaggctcgtccctgccagcctgcccaagacggcctacatgatctgcttgattgagtttgccgagcgcgcctcctgtcagtcccataccatcgctccctcgaggccacctggctgactgggtcaacctgtcccctctgtcgcagactacggctgcgtcggactcttcagcaattttatcatgaaggtccgccctgtgtcccttcatgttctctcgataggattctctcgataggagctgacccctttcctgacgatcctcgcgaacagccgctgccgaaggacggcaacggatggggcgtaagtctctgccacttctccttctcggcttgacaaggacggtgagactgacggagaagatcaccttcacctgcacaggctcctggcaccccaaacggcacggccggcgcgctcggtctcggcctccagacggcgacggccctgacgacactcttttcctttcttgcgtcagtcgcggcttgctcaggccgctgtcgctggacacacgtactgacagttactctcccttgcagctacacgattccgattgccggcggtatcctttccgacgtcaagtggggccgcttcaagacgctctggatcggcactctcgtcggaggcgagtctctctcccgaccgcctcccgcatgcctcctgcgactgctaactcctcagtttgtctgctcagtcgtcgcccatatcattctcgtaattgccgccctcccgtctgtcatccagagcggcaacggcctcgcccccttcatcgtctcgatcctcgtccttgccctcgcgtctggcctcatcaagccgaccgtcgctcctatgctggccgaccaatcgccgattcatcggcaggagattcggacgctcgcttctggcgagcgcgttatccaagatcctggcctgacgctccagcgggcgctgctcgtcttctattggttcgggacgctcccgctccctttgctcgactccacctcgctgacgaccgcgcctcctcctctctgctccaggtgcatcaacgtcggtgccttccttcgtctcggtacaacttacgttgagaagcgaatcggcttctggtgcgtcgcgtccgcctccgacgtgctgcgcggcgacttcccctcaaggctgggctctgacagctgaagcaccccttcgcaacaggcctgctttcacggtgcctgggatcgtctacgcgatcgttccagctgtgcttctgtacctgaacaagcggatcgtccacattccgcctcaaggcacggtcgtcctcgacgccggccggtgcgtctgcctttgagcccggctcttcatccccggaagtgcacgcttacatccgttccccgtatgcggccctctagcgtcttcaagcgggcgatcctgaagcgcgactggaatgctgccaagccctcgtacatgaaagagtcgaccggatcgcttccgatggaggtcacctacgacgacgactttgttgaggagctcaagcggacgatcaaggcctgcaagctcttcctcttcctgcccatcagcaacttggccgacggcggactttccactgctatcacgagcatggcctcgcagatgacgacaaagtgggttcgggtggtgagcccgaggcagagtgactgcatcggctgacgcacagtctacctctcgcgcagcggcgcccccaacgaccttctcggcaacttcaacgccctgaccatcatctttgtcgccccgctcctcaactttgtcatctacccgtacctccgcaagcgcggcatcaacttttcgcccgtccgacggatcgcggccggcctcgggctcggcacgctgacgatggtcgtcggcgccatcctccaatacaacgtgtatcggcaatcgccctgcggctactacgccaccaaatgcgccgaggttaccaagattccggtctgggtccagattccaatcttctcgctgcctgcgattatggagctcttcatcaacggtcggtctcctctttgctctgtcgcgatcgccagcgcttgcactgaatccgctccccgtttctaagtaaccgtctacgaacaggccatcacgcgctcgccgcagcggatgaagggtcttgtctacagtgtcatgctgtaagcccagtgtcccatccgtcccccccgcgctgcccctcgtcctgaccgacactgcccgctctcgctcgctcattcacccgcgcaggttcatgacggccctttcctcagcgatcgtactcatcataacgccttcgctcaaggaccccgacctcatttggccgtttgtcggtatcggttcaacctgcttcgtcagcatcttctgcgtcctctacgtgcgttccccttcctccgttccctgttggctggctgcctggctggttggaggaggtcgtcagaggagggcagctcggcgctggatcgcccaagagagctgccggcggcgtccccgtcgaaacgcatcgagtcgcaatgcatccagccgggcgcaccggcgcgctactgcgcagaagccattcgctgaccctcctcctttcgaccggcagttctttggcgacatggacaagaacgaaggcgtcgaggtggcgatcggcaccgaccggaagattgaagggctcgaggggccaaagatctcggccgagaaagcgccaaaggtctaagggggcttagctagcttcctgtgtcgcggctgtctgtatctacttttccgttcttcttgagcagccctccttgttcgccctgcaaggacgtcggccgtgtgtgaggtctcttgggcagacgtcagcggaaggacttggtcttcccatgcgtgacttcccccctctcaaaacgtgtgcaagcggcccgccccttcttccaagacggtcgagcagcataaaaagaggatccatcttagagttacacacatccgccagcatccccgaatcgacacgaagcgacccagcccccccccccccccttccccagccgtcctatccctggtgtgatctatgcccccccccccgcctcccgcctagcccggtcgtctgtactccgccttgctctccgccgtccgacgccccgctaggggcttagcgactcccgtctcctcacgaagctgcggaggtcgcgccggtcgtggtctcatcgacctggtcgagctcagatcttgcccggtcccgagcgggcggcgacttgtcgtcgtcgctcgattgctcatctatgatcagaagagaagccggaagggataggctgaggagggggggaaggggcacaggtgtcagtgtcgaaacatcgaaggctagccctttttctctaagcggccgagaccgcacgacgcccacgcgccaaacgcaggacttacagccattcttgaccttgaagatgttcatcaggaccgagaagaggacgatcaagacggccgaccagaggaagacgccggcccgctgtttggccgggtcgcgcagggttgggacaagcgtcgaaagggcgacaaaggcaaaggcgagggtggcgtctggcggggtagggtgaggccgtcgagcggtcagtgccagcgaggagcagggagagagagagagagagggagagggagagggaaaggaggacggacagatgatgccgacgacctgcgtctcggccccgagctgctgctggaacccgcccgcgatccactgcgtctggccctggcggtcttttgtcatgtgcggtgcgtttcggatccgattccacatgtagcccgagttgaagaggatgattaggaagagggtcgccggcgcccagaggaagcgcgaggtgaggacggggacgaggacgcggcgcagacggaagagcgagaagctcgcggcgagcaggctggcgtggggtgtcagccgtttgcagtggtggcaaggggagcaagggacgcacgcgatcggcgtcgcgatgaggagagctgaagacatcctgggtagagaataaggcggttgacgggtgaagggcaaggcggtcggcgtcgcctccatctcgcagcagcggccggcgagttacgcccggcctcattacgccaattcacgctgcgtaagatgaagccgctgctgctgcgcccagctgcggcctcgcttcgccctaactatctcacctcctcctcccccttcacccgccctcgtctagatgggcgaacgaccgctctttgcccgcccgacctcgccctcatcccgctcatccggctcgctccagcagcacgacatggtcgaaatctcgatcccaccgccgtcggcagcctcgtcctcctccacacctccgccgccgccgccacccgctcggctgctctggtccaagtcgcacgtctacgttcacccgacgccgttttcggccggcaacgtctgtggctacgtgtcgatcgtcgagcagacggtgcgtcgatcgcgagacgagccgttcttgcccaagggtacgtgcggagggctgacgcctgctccctccccgcaccttctcgcttgtccctccgcaatctcctccttgaaatttaggagccgaaaaggatcctcctgtcgtggctacctcagacgctcgccgagcgtcgggtcgactacgacgccttcgtccgggccgacagcaaggacgggccgctcggcgggatcagcctcgaggacgagccaggtgcgtctccgcccgcttgcagctccacccgcttcggacctgaccccccgcgttctcgcttatttccatcactttgtctgccgcagactacgtccttgtcgagcccatccccgagcggggcgagtcgcacgcgttttctgtcccgcttcacgccgtctactcgatcattgcctacccgccctcgctcagcaagtggcacggcagcctgacaatcaaccttgacggcggccagacgctgccgacggtctgtcctgtccctctctcaacttctggtgttgcctcgcctctgacactcggctcttgtcccgctcgactcccagctccacttccacgacgacgagagcgcttcgaccgtcaacctcctctcgggcgggcgctaccctcccccgccggcagctccgtcgatcgcctcgtacccaccccctccatcctggggcggcgaagagcttctcgacaagctccggacgttctgcaacctcctccggtcgtcgctcgagcccaacctgtttctgatcgaccccaacaggcaggacctcgagcttcacacgtcgatgctctttgacgactcggctgtcgacgacattctctcgcccgtcccagccaaccgccggccaggaggccaggccggatttgagtcgtcaccctcgtcatcgtcttcgcggccgccgacgttccctccagcgtcggcgatccaccctgcgcggacccagctcctctcgaccttctctaagatcacgcgcgcagcgagcagcctctcgtccgagctcctctcgcacccggccgtcgcgccccatctgctccagccggtcaagacgctcatccacgccgacgcgccgcagtttgcaaagtggtcggacctgacggggacaggcgagtttgagtcggccagggtgtatcttgcgaggtgggcgaggctcgtcgcagaggaaggcgagcggaataagcgtgcagagtcgcccgtcgtcggtattggcgccagcgctgtcaacggcggaccggccgccaacgctggctgcggtggagacggtagtccggctgccgagggcgacctcggggtctgggaggtgctccgtttcgcaaagcggctcgggctcgaagacatccggacgacgcgcgtccagggccggccaattggccgggccgagtgggacagcttctttgacgatcagggctcgccggttcaggacgagcagtcgattcgaggcgaggtcttccgacgggtgcgttggcgtctctcgtctgctctgattgcatcgattcaaaggcgctgatcgacccacacgtgctccctcagggcctcgagcccgcagtgcgcaaggaggcctggccgttcctcctcggcgtcgtccccttcgccagcacagccgtcgagcggaccgacatctggtcgaaaaagcaactcatctactcttccctccgcgcgtcaaagacgctcgacggcgcgacgcgcgcaaaggccgatgtcgcagaggagattcaccggatccacgtcgactgcaggaggaccgaccgcgggcatccgatgtttgaggcggcgcagccggtggagggcgagccgaccgaggacgagtcgggcgagtcgacgaaccgtgcgtccttctccggccggaactgtgtcccgccccgccctgactgtttgccccgccctttttctagccaacgtcgacaagctcgccgagatcctcctcacctacggccactttgactcgaacgagctcggctagtgcgtcacaccaagccccttctggtgcttgcttgcgaaggaggtcgtcgtcctgaccccctctctcccttcagcgcgcaaggcatgtcggacctgatggcgccgctctttgtcatccaagagggcgacgacgtccggaccttctggtgctttgtcgagtacatggagcagatggtgcgtcctcccgcctgccgctgaaggtcacacttcgaggcgctgaagcccgagcgagtgcccccccacctttgcagaagcaaaatttctacagggatcagtcggggatgaagcagcagctgtcaacgctccgcgacctcatctcggtcctcgacccccagatgtttgcccacctcggtgcgtccctttcgttcgctcgtcggcccgcttgctcgctcgcacgggctcaccgtgttgaccgctgaccggagcgtcagaccccctcttccggcttttcgcgcatgtcatggccgtcattgtcgactcagagaaatccgagagcctcaacctcttcttctgcttccggtgcgtgccccacgcgtcgttccggggaaacgtccggcggaagctgacgagagccgcgcgcgtccgtaaccgcccacagatggatcctcatcgctttcaagcgcgagtttgtctttgacgacgtcgtccggctctgggaggtctgtccctctcgagtcactttatccgtgcgccgagccacgcattaatctcccctcccctcgcccgcccgccccaggtcctcttcacaaacttctactcgaagcagtttatcatctttgttgcgatggcagtcctccactcgcatcgcgacgtcatccttcgctacctgtccgaggtgcgtccgagcccaattgtacaccgcgcgcgcgcgtgtgctgatcgctctcgtcctgcccgcgccagtttgacgagctgctcaagtactgtaacgagcttagcgggacgatcgacgtccagtcgacgcttaatcaggccgaggtgctctttgtttgtcctccttcaccagcccgtcgaccgaccgaccgaccttgcgtgcctcttcacctgtccccttttcacgacacctcactcgcccctctccgttgtagcatcccccatcatagcgacgcccttatcccttccattgtaggtctgattctccatgtcacgcttcttccccgaacgtcggtccggaagcaggaccggcgccgttgctgcgcgcgacctagagctggctcgtcctcgcccgagccgtcgacgtcgactcattcaagcagctctctccctccctgctcgacatcgtcagcgacgacaacaccgaatcggcgctttagacacgggcgttaaacgcagcccggactctgcggccgcttctgggaggcccggtcgagctcgctgcgagcccgagctctcgcgacacgtcgtcctcgacctccctcgcgacacgtcgctctcgacctcagcagcctgagacgagggcatcaagcccgctctcctcgttctctcacccggatggcgccgaagaaggcggctggcccatcacgcttgacaccgctggcgccccaggcagtgctccaggcccagctgcacgtgctccgtcacctcatccactcgctcctgcacacccgcggtctctatccggcggccaccttccagcagcacgtcctctacggtgtccagggctggcagtcgcgtatcccaggcgtcatcagccacctcgaccgagctatcgaggccctcgaagtagctctcagcaagggaggccgcggcctgatcctcctcgtctttctcagaggcgaggtcggcaaggagcgctggctgtttgacttccagccgatcgtcgacctctccctgaaggcgtgcgtgctgccagtcaaggcaagacgagcgagcgcttcgtctgagaggctgacctttgatcgcaatactcaggatcacaggcgggccgacgccggacgagctgccagagcttctcgcgccgctcatcacgacgaccatccaagactcgctctcacttccgtccctcaatcacacggacgatagctcgtacacgattctactcgagcttccgcaagctccgacgccgccggcagggaaggacggcgactggctgccgccgctgcccgagcggcccagtagcgtcggcaaaggcgtcaaatgggtgggcgccagcgagacgagcgttgttgatgtgcgtgtctccgtcctcttccttgggcgctgtcgcggcgctgacgctcaaattcgctgcagatggagattcttgtgcaacagctgatgtagtggctctgactgagccctccttgtcacgctggccaagtgagggtaagcggtgccgtcccccctccccctcctttagctctcctcgaccggcgctgacgaccctgccaccctctgcactagacatctaagctgcatcgcctgcatctgctcatccgctacgacccccgcgcaggaccggggccgtctcgtagacaagaaacaagccgtgagatacaaaaaaaaaagagggaggcgcagctatttgcacttctgggcaacgatgttcggcccatattcgtcccactcctcctttgagatccagagctggtggaacgtcccgagcgaggcgaggatcgagccgccgagccacgacgagaagcggcgctctgtcggatggcccgaggcgtgaatccggaccttttgctgtgggtcaacaaggagaaagacttgtcagctcttgatgcgatgatccaacgaatgacgcaggacgtacgccggggaacatgacgctgagctcaaagttgagccggtcgacaaagcccggcaggaggctgccgccaccgacgacgacgacgttttgaaggaggctcgcccggacgtcgacgtcgcacgtcgagagcgcctcgtggacgagctgcgggatcgcgaccatgtcgctgtacgtccgcgaattggccgtcgccggcgtcgcgagctgcgaaggcgtcggtggcacggcctatcgtcgggcggtgcaagaggcgcaaaatggtcagcgtcgtgcaggctacgcgaaagggtcggcgcaagcgcgacgcacgtcgttccggtatcgcgggtcaaacagcatctcgcccagcttatagcgttcgctgccaaagcttccgttgtagccgtccgggaactcgaatggtcgcgtcggccgctgtgcgacatttctaatgagggaggggagggggacggtcagcttgcgcagccaaactcagagcgtacccttcgccactggtacgtacctgtcctcgtacttcgtctcaaagaccgcgcccgttgcctcccggaagctctcgacgacccggccctctgcccaatcgcgccagctgtcggtggtccccgcgacgcgctcctgacggaggttgaagcgcggagcaacgccggccgagacgggcgtcctgtccttgatgagctggaagggcgtcaggccaagtgcgaacggccttgccgggtcggccggcgagcggaggaaggcctttgactgggcgtggatgaggtccatcccggagggctggcgcttggtcccgctccgaaggacgtagccctcgatgacgggcgtgacgacgacggcctcgcgaccgaggtcgacgacgagcgccgtgcccttgcccgaggcaaaggccgagaggacgcccgagcaggccgtgtaccaggccgggacgttctcctgttcaaagaagagctcggccatgagcgtccgctgagacggcggcgtccaggacggctccgacgtcagaatcgggtggtcggccggcgacgacggtgaggccgatggcaggcgcaggcggtgatgcaggatgtgggagaccaacggcggcagcgccgaggggtccgtcactgctcaagagggaggcagatcgtcgagaggggagtcagggcgatgctcgacccgagcaagcggttgcagcgagctcagctggctcgtcaggaagagcaagggagactggtccgactgaccgatcccatccttgaagacgttgccgacctccatcccttcgcgccagacaccgacgccatcctcgccgacgtagtacttgcggaccttgccgccctcgcccgggtcgcccgcgggcgcgtcgacgtcctcgaagccaaagaaggaagggacgacagccttgggcgtgtcttcgccggcgtagccggcgcgggtcgtgtgcgagccaaagtcgatgacgatcgccgagactgcccgaagggggtgatgggcgagcggaggtcagctctcgaaaggcgagaggagcagggccagttgagccagaagggggagggggggaggctggctggagacggaccttcgtctacgggagggggaggcgagggggtccgccgggcatggtaaccaagagcgtcgtcagtctcgtcgggctgagtccgagagtacggtcactgacctcctccgtaggtgaccatcctgaatgagggagaagggctaaagaggggagaaggggggtcgttggtagacgtcgagctcgcttcgcgtctcgcctcctccttgacctcttgtcgtcgacctcacctcgactcctgctcctctcccaaagatgaccgggacgacaagcgtgctccatggagatctgcacgtcgcctacatccagtctctgtcctcggtaagccgcgccctatctccctttgagacgcatgccttccagctgagcctcgcctctcgctcgctcgcgcgccgctgacgccgccgccgccagcccgacgacctagcttaccatctctcggatcacatccggctcaacggcacctactgggcgctcatggcgctgcatattctcggccggaaggatgcgctcgaccgggacaagatggtcgactgggtcgggagctgctgggatgacaaggctggtgcgtgttgcgctcgcttcgaggcggacccggagctggcatgggtcagcgctcagtacttgtcggagccggggaagctcgcccgtcttcagcacaggaaggattcgactgacggcgctggactttcctcccctttctacaggcgcctttggcagtgcaccgggccacgacggccacctgcactcgacgctctcggccgtccagatcctcctcattcaagatgccgaagacctcatccccaaggaccggatcctcgcctgtccgttccggtcatgcttgcctccttccgacgctcgccgaggctgaaccccgcgcctgctcgctcgttcggtagacgtccagtcgctcgcgcagccctcgggcgcctacgcggccgacatgtggggcgagaccgacccgcgcttcacctacgtcgccgtccagctctttgcgctccttggcaggctcgacctcgtcgacacgagccggaccgtcggctactttgggcgctgtagaaactacgatggcgggtttgggtcgggcgagggcggcgagagccatggtgcgcagggtgcgtccgtctagtcctatctctccctgtcccgccgccgccgccaatctctcgcatctgcgaacgctagagcttcgtccagatccggcccgctccgctccctctgccgttgaccctcgccctccgcctgaaaaagccggctcacacctctctctcgcccggcgcccatctcctctctcgaccttcaactctgctcctccaccttctctcctctgaagcttcaacgactacgccttgctcgttcgccctcggccaaacagcttccagcagccccagacgatggcccggacggtcaacatccagtccaggggcgcctcgccgccgcacaagtcggccaagtgcgacttggccagcagggctgtcaaacgacctccgccgtcaaaaccaacagctctcgttggcagcagcagcagcgtcgagctctcttcggtacgtttctcttttcctctggcccggctcggctgggcagagtcactcaagcgaatctcggcccgaggtgacgacgtcgagtcgagccgctattgctgacgtcctgccttccaactcccatctcttctccgtggcagctggccggaattaacgcgatcgactctggcgaggacgaggtcggccgaggcgagaccgacgatgacgccgacgacgacgaggccggcccttcgaccaaggccgccaaatcgaaacgcaagccgacgtcagagccgggcaagaagatgcacatgtgcagctggcagcggtgccgaaaggccttccagcgcaagagcgacctcctccggcacgcccggatccacacgaacgagcggtcggtcccgcgtgccgctttatctcgtcccttccgcccgctgaccgccttcttcctgctcctgcccgtctctcaggccgttctcctgcgagcacgccggatgcggcaagtcgttcatccagcgctcagccctgacggtccacacccgcacgcagtacgtctgcccgctcgccttgccctctgctgcggcccctgctgaccttccctcttctgcccggtcctgtagcaccggcgagcgcccacacgtctgctcggtctgcgccaagtcgttctccgactcgtcctcgctcgcccggcaccggcggatccacaccggcaagcggccgtaccagtgcctgattgcctcgtgcaagaagacgtgcgtcaccccttgctcgccctctttctctgacgcgcatacaatgaaggctcaccgccccgatcgccgtcctccagcttctgccgcaagacgacgctgacgaagcacgtctctcgggtccactcgagcctgaccgacaagcagcagaaggcggcgctcggcacgaacatcgccccctcgccggtccgcgtccccaagccgcgaccagtccgcgcaaaggcgacgacggcgaagatgtcggtcggcaagctgcgcgcgctcgctgcacctcgccagggttcgacgatgacctctgcgtctcccggacggtcggcaacccgaggcccgtcggccggatcgtcgatcaagacgaaaccctcaaaggcgacgacggcgacgaccttccacccgtaccggctaccgaccgagcggcaactcatgatgatcgaaggcaaggcctcgcgcgccggctcgtcggatccgacgacgaccgcgcccccggtcaaacatgatgagacgggcggcccaatatcgtacttgcacgttccgagcccggcgctgagcgactcggacgacgaggactacacgtttgcgcaggtgccggagcatctccaggagccgatgccgcaggcgatcgtcgacactcttgcccggccaacggcgactgtcgcgcagagcgagactgcgatcgatgacggcaagatggacgtcgacgatggcgccgtcaccgacaacgagtggttccgctcgtctggcccgggccttgccgccaagcttaacgccctccaccctcatcggcgatccgtctttggccacggcggcgccggtcggtccttctcaaatccggtacggaccgcctccgacgcggacgaggcgtcgattcgcgagtcgtggctcgccggcatcactgcgcgcgaccggtcgaccgccggcgtcgagtacacgtacgaacgggcgatgtcgacccctggcacgccggccggacgcgagcgccggctcgacgattgggagcagcaggttaacgacgacggttcgcccatctcgcgctcagacaacacgcaccaggcgccgtacacctacccgccctcgccgccgtcgctggccgccagccaggtccacacccaccagtaccggacggcgctcgacgcctcggcgacgtactcgttctcgggcgcgctctcgcccgcaccttcgtcgacgtcgagcgccagcccggaccggccgacgacgccttacgacggccgatcggcgtacgacactggctcgtcgcccaagtcgacacactcgtcggccggcccgccctcgccagcgtcacacgtctcgctcccagccatcatgggccattccatgaccggggacgagcagcacgcactcgcggcgtatcagcaggcgacggcagtcaccaacggcggcgcgcagagctactatgccgaagcgcagccagcgccgagctacgcctacgtcgacgagacgtacaaggaagagcacgcggcctactacgccgccgtccaagcccagcagcagcaacagcagcagcagcagcagcagtactgccattcgacgcccgaggcggcctaccgaccggtctacgctgccagcccttacacgaacgcgacgtatgggcgctggccgtcgcacctcgccgtcccgccaggctactacgctgcgtcctacccttcggcttcctacggccagcatcagcagcagcagcactcgccggcttcgctccttcgctcggcgatggcgctcccgacgcccatcgagccctcgacgccgctcgtcagccggccgtactggtcctcgacgccgtcctacggcccgccacatggccggtccgtacccgtcgaggcgggcgtcacgtcgtccttctacgctcggagcgtccggcgaccgacttttgcctcgccctacaaccagcagcggacgtacgcccacgatcacggcgacacaggagcagatgacatcgcctcgtatcgggtcggcatcgacgccgccgccacggccgccgcagccgcagcggatgagaaggccgcggcagacgacggctaccggttcctccgctcgccagagatggcgccgagggcggtcgttgggccgacggcgaacatcgggcttgggtttgggcggatcgaaatggaccgcgaggatcgggtgcgggtcgctgaagactgcgagatggcctacgactgacgggtcggacccccccccttctctcactcacttacttgctcaacttgctcatactctcccctctattccacgctgttcctcctcttctggtcttcagtctccccacatgcccccttccccctttgcagttcatagtcgccctcctccctgcctctcatccgtccaagcccatctctagacccctcccctttccccgctcgttcactttcacttgtagccctcatcactcgcctgtatttctaccatctgtgcctgctctgaacatacgtccctcttactcttctgctcgagcattgccagcaagggaggggtacttaagggcgcgcagcaaagtcggagccatttccgacgtcagcgggcgtcgatcgaggcccgcgccagcaggcaaagacacggcccgaagcctcgacctcgccctccttgcctcctcatcccctcgtcctctccaaagcaatgtcgtggcagcaacagcagccctacgcaccctatccccagcagcagcagcagcagcagcaggaggaaggcgccggcccgggcccgtcttcgtcagcgtcagcgggctcgatggcgcctgcaccgggttaccctcccgccggccaacagcagcagcagcggcagcaagcctaccagcagcagcagcagcagcagccaggccaagaggcctactaccagcatccatcgcagcagcaccagcagcaccagcaccagcaccagcaacacccgtctcagcagccgcaggtcgatcgatcgacctacgcgcaggcaggctactaccagccgccggccggctcgagttccggcggagggcccccggggttcaacacctcgcaccagcaccaacagcagcagcagcagcagcagcagcagcagcagaggtcgacatcggcctcgaggcccggctcggggtcgtacagcgccggcggcccgcaaggcgagagcttcagcaacggccaaggcgagggtcggcggcggtcgtcaagcaacgcgaatggcggcgggcaaggttctgggcagggggagggcgccggtggtggtggaggagcgctaggaagccgtcccttgcgggcgacagagactcacgatgtgagggagcgggcccgtcatccgctcgggccggacgccagagtagtacttggtgttgcgctgcatctgggcgaccgggccgacgacctgaaagatgatgccgacgacgttggactgcagagtgggagtgcgcaagggtaagcttcggtcgctcgcgcatcaacgacccttcaggagggacgtacgaggaagaagtggcagatggcaaactggaaaggcaggcaaacgagaaggacgagtcgcatcgcctggccgtcggtaaggtactcgacgaggagcttgcctgtcaatgaagtagactcgtcagcaaagttgcagcacgatcatcggacgtgagcaaggacgcacggatcgtcgtgcaagcgagcaagacgttgaggccggtcgtcagaccgcccatcatcggcgcttgctgccaagccggccggactgagcgaccgccggaagccatctcaacatgatgctcgaccgactcgctgtcctctgcggcatcaacagcagcgacagacgctgccttggcgacgggtttggccacgggcttgctgctctggcggcccgtgttccagaggaagtcgatcatggcggcctgcatgaagacgatctcaggtaacagatccttgacgttgtcagtccaaagggcgagcgactgtgtgtctcggatgaaggcggcttgttctgttgttaagaggggtccgatcagcgcgttaaccaggaaatggaggggatcgaaagggcagacgtacggaagcgctttgcggttgcgagcgagcccagcttgtcaatgacctgcacgcggcggtcgtccgacatcgagacgaagagctcttccggcgacctgcgagggtgatgaacagatggacgtcagtgacagaatcacccgaggccgctgtggtggagcgactgacagctggcggatgatccgctccacaacgtgcgtgcccgacaagatggcggccgcgcagttgagccggcagaggtcgtccatcaggatctcggagccctcaacctcgtccatcagcgggtacgtcacatagtgcccgaccgagatgcggacggcgacaatgccaaactctgcgtctggaaaccagtcaagcgcctgggccttgcggtagatgtgctcggccatgagctgctcttttgagatcgagaccgagcctgaaggatcgcgagaatgcgtgcagaacaagtcagacctgctataagggcgtcgacgatcaagcagcagcgactcacgcggcccacagatctggtcggactcgtcctcgacattcagctcgtcgtcgtagtcattgtcgaccggggacgagatgcgcagcgaaagctgcaagggcggcaaagcagagcgagtcagcggaatgtcgagggcgctcccaagcagacggacgtagtacgcacgccgcggcggtgtcggaccgagaccgcaggagatccaccggcgatcgatgatgccgcgctaggcgctaggcgagaggagtcgcagatgccttggtcagcgtgccggacgagcgcgcagttcagaccttgtagccgacatacaggaaaagtagccgtcctgttcgaaggccggtgaccggatcgaaagctgtgtgcgggaatgccgccgtcagcgagaagatcaggtcggcagtagttgtgcgctcgggtacatacagcctggcgctgccggaccgagatgagcggcgagtcgctggtgtttgactgagtcgaggccgtccgggagtgcatgaaaggctggcgacggatggaaaggggaagtcaggtcgggcgaaggatactgcaagaagtgcaaagagcgacgacgcaccctcggcgactggcgcgctgcgcggcgggcctcgtggtccacttcgagccgctcgcgaaagtcaaagtcgcctgccgggagatgtagaccgaggccggtgagaatgccgcccgggatgccagttggtgcgctagcgcgctcgagtggcgtggcgagcgcgatttgaggcaggttggacgtctggctcgacatcgaagccgggaaggaggatgggctgccgttggaggaggtcatgatggtccgagagcccagaaggtccttcgggcgacaggcggcggcgagcgggtccaggagagtcggctaagagtgtcgagggacgaggtgagggagagcgaagaacctgcccggcaggacctcgagcagaagaggcatcggtcgacctgggaggcgcttgttcggctcggccggggcggcagcagaggcgggacgctggccgctgcccgggcatcggtgcatagcttgtgcttgtcaagtggggaaggggcgagggaaggcgaggcttgggtcgataggccggcgggacggtcgaaccccctcgatcgcccaagcagccaagcagcctcccgctgctcgtcgagaccggccggccgcccagacggccacttcgcctttgacggccatcccagaacgccacgtcctgcccgctgccggcgccgggagggggacgcctcttgcgggtcgggcacctagtccctccccgtcataggccgccggccgacgcctgccaggctcgcccacctcctgaaggaaagggccgggcccggccgcttgttcggaaacaagcggtggctgcccaccctgctcacccaagcctgcgaaggcctgacgctcacacaaagacccaggcgaggcctgaaagggccaggacagacgtccccgccggaagatcttcttcgcccccgtccagccacgtccttgccctgccctgcccttcagctggtcgactctcctcgcagtccacgttctgccctctcaaccttgacctcctcgacggcctaccgaatttcagatgatccatccggagaccaacactagtggacggtgcaccacgacgtcgagctcgactgcctcgcccgcgacacgccaggtttcgttcgctccgaccccagtctcgccgagtcatcggacctcgccactgcaggccctgcgccctctctctccccggaagaggatctcggaggacgacgccatgtttctcgcccagttcgaccagaagacggtccattccagtgagacggtcgacatcggctcgccaacgtcgtccgaagtcgagctgccgccgacgcccgagcacccctactttcagcctgtgccgcgtcgggtcgtgcacagcgacgtcgacatgtgtgcgttgttgcctttggccacctcgggtcatgaagcgctcgcgctgaatatgtcctgccggtccgctcctccgtttcgcagctgaggtcatcatcgaggtcgagcagctcatggccgagcacatctaccagcgagcgagcgtcctcggctggttccccgactcgagcttcggcgctgtcgccgtccgcgtctcggttggccactacagcacgtacccgcacatcgacgagctcgacgggagcgacgagcttctccagagcctctgccagctcaactgtgcggccgccatcctgaccgggacgcatttgatcgagcggatcctccaggagacgcgggtcgaagactcgacggtcattatgacaagcaaccttcaggtccaagtgatcgacgacctctgcttcctcggctcggccaaacgctaccgtgcgtcgccctcccctcacctgccgactgggaaggttttgctgaccttccccgcccgcccttgcttacacagagcacgccgcattcattcgctcctcgcaggcgctcgccctttggaccgacaacgccaagagcctcctcgctcagctcgacagcatgcaggacgccatgatgacgctcatctggcaggacggcaactatgagcccgccgcctacgagagcggcacaacgggctcgagcggccgctcggtcttccaccaggcgtcagtccaggtcagcctcgcgaccgccctcaacgtgctagccaacctgaactttatcggtaagcccggacggcaggtctctgctcagccgtcgcccgttgactaacgtttgttcatcgcgctgtctctgcagccaaactgctcgtcgccttcctgaccgacggcaacgccatggcgctcgttccggttgctgctgcgcccttcatgttcatgatcagccagttcctcatggtgcgccgcttcctcttggcagccgtcggaccctctagtgacgttgctgaacctggtcctccagtctcaagtcgtcagcatcgttttccagctcgtcggcccggtcgcccagatgcagcgcaacaccaagtactactctggcgtccggcccgagcggatgacgggcccgctccctcacatcgtgagtctctgtcgcccgcaagggacggcttcctagcgtgaatcgtgatggtcatggcaatcagacaatgaccttgctcagcttgctcagcgctgcggaagagggcgaggtagaccgggtcagcaggctgcttacgaagcggcagaacctaatcgcgcgacggacagttgagcagcaggtcgccctgcttgataacctgctcgtactgggcattcttgcggtcgcgccggttcgtctcgacgacgccgttgaccttgtcgatcgtgcagttgagccggccggacgagatcagccgcgagaggtcgctgcgggcaggccgggcggggcagcacgacgcgtcagttgccgatcgaaatagagggcgcaaacaggagaacggccgcacttgtctataaactcggggccgacgccaaaggcggcgcacatgctgtccatcgtcaacgagcggtacgactcgagtagctgggcgtaagccttgatgcgcatctcgcggacgtagtagcgcgcatgggccgcgaggatgcgcgaaggaagcaggagagtctgctcgacgtcggctgtaaagacgggtgagagatcattggtcaggacgagggccgctgtgagcggagacgccgagcgtcacggccgtaccgagcgagcggaagaagcgagcgtagtcgcaggcataaagactgccggtaaagtcttcgagcaccggccgctcggggaagctctggcggacctctggcgagtcgatgatcttggccttgacgtccccgcgctcgaggccgacgacgccagcgaggacggcaagcgcgaccaggtcgtcccacgacatgagctcggtcgcggcaaacgtcgttagggcgtcgatcaggagcggcgcggcggtcgagaactggcggagcgagagcagatgccgggcccggtagagcgagagccggttccgacggtcgtagtcgccaccctccttgatcagcctatggaacgcccgagagagcgtgcgagagcagtcagcctttggaccagcgattagagaggcgcttggactcacgcatcagccttcggcaggtattcctcgacgagcgcgtggtcggcaaagaagaagccgacgcggaggatggtgaggttgatgtcgatccgtgctccgagcccgggcgtcttctcgagcgcgagcgtcagcgccgcgagcgagcgcgtctggacacgaggcaggcgtgaaggtcagcacttgacgagctgctcgatggcggcagcactgctgggcacgcaccttgtcgccaatctgagcgaggtacgccgccttccgacggaggacgtccgacacctcggtctcgcccatcgactcttccgactcagtcaactccttgtcaaacttggcgagagcctcggtgttcttggtctcgagctttgacagcagctccttggccgccggcggcaggagcgaggcgtcggtctcgagcagcgtggcgaggaagggggccatctctgacgaagggacgaggcgagccgggtcgcgtcagctctcggcggcatgcgcgacgtactgaagctaagcgtcaaagggccgtaccatcggtctcgatgccgacaagcagctccttagccgccgtctcgtggaggtgctttaagctcggctgagagaggtggaagtaatgctgggcgagagcgaggttggggatgggcagcggcgcggcctcgtcgccggcgcccgtcgtggcgtccgagtcgtccttcttgacctccgggaccttggacataatcggtctctttgtcgcggcgagtaggtttagacgatgcggtttcgggcaggctaagtcgggtctagggagttggaaaagggcggtcggaggaggtgcgtcgagatgggtgttggcagctgccggacgaagcgagcttcgacctccacgccgacgaacctcagcccggccatgctccctccgacctcgacaccctccctctcctcaattcttgccatgtctctgcctccagcaaacgtctcgcagctccagcaggccgactcgctactcgccgagtcgccgcgggaagccgagcagcttctcctgtcgatcctccagtccaagccgggtgcgcctctcgagctcctcgttgcatctccgacggcggcggcgcgccaacgtcaggcccgctggatagtcgaaggaggctgaccctgctttcatctgtcccgccttggatagatgccgacgacgaggacgccgtgcacgaccaggaggatgctctcttgaagctcggcgagctctaccagtcggagcagtgcgtcctgcgccgtcatcgcgtgccgcgaaggcctcgcccagctgacgctctgtccctcgccgtcatcgacaggaacgcccaggcgctgtccgaggtcatcgacaagagccgagggctcttgagctcggcaggcaaggccaagacggccaagatcagtcagtgctcgctcgaagcaccagaaactgtcactggagctgatctctggccacctcgccgaccggaccagtccgcacactcctcgactcgttctcggccatccctggctcgcagcagatccaaattgacaccgtcaagtccaacattagctgggcgcgggacgagaagcgcgtcttccttcgccagaaccttgagacgaagctcgccggcctgtgagtcatgcctctccctgctcgcatgcacggagtgaggacgcagtccgctaacgacctgtacggccgtctcacaggcagatcgaggcgaagcagtaccgcgacgcgctcgcgctgatcgagggtctgctgaaggaagtcaagcggctggacgacaagctcatcctgaccgaagtccacctactcgagtcgcgagcaaacggcgagacggccaactggccgaaggcgaaggtgcgcagacgggaggttccggctgcgatctgctgcctccaaagctgaccgcactgctctccgtctctctcgtcttcaggcctcgttgacggcagcacggacgtcagccaactcgatctactgcccgccgttgctccaggcccagctcgacatgcagtctggcatccttcacgccgaggacagggactacaagacggcctactcgtacttcttcgagacgtttgagggctacacgggcgccgacgacgcgcggtcgctaaaggcgctcaagtacatgctcctctgcaaggttatgatgtcgcaggtccgtcggccctcggttgtagcttgcgcgtgctctgtcacctcctcgctgactcgcctttcacgtcacagccgcaagacgtcgcttcccttatcctcgcaaaggcatcgctgaagtttcagggcaacaaggagatcgaggcgatgaaggaggtcgccaaagcgcatgagaagcgctcgctcggcgactttgagagcgcactcaagacgtggaaggagggtcagtcgtctgtcaccctccgtcgcttgcaccgctcgatgctgacgagtgccgcctgtcgccgtcgcagagctgtcgaacgacccaatcattcggagccatctcgcctcgctctacgacacgctgctttcgcagaacctcgtccgcgtcatcgagccctactcgcgggtcgagattgcctacgtcgccgagcaggtcggtcagccggtgcagtcggtcgagaccaagtgcgtctgggttttgatggccgcctcgagcagaatccgactccagagctgacacccacacccgtccgacgccgcccaggctgagtcagatgattcttgacaagctcttcttcggcgtccttgaccagggtgctggctgcctgattgtctttgacgagccgcaagaggatgtgcgtcccttcctctcctgctaagcgcgtcgtgatggcgcacgctgaccatctgcgtccgccttgatcgcatcaccccctacaggagacgtattctggcacgctcgagacgatgaagcacattggcgacgtcgtcgactcgctgtatgagaaggtgcgcatcttccaagtcgctcgttcgactggctcgcactgatggccttttccctcttccgatccaggcgaccaagctctcatgattcataagattggtctcgacggcgattgtatgaccgtctgcctttcgtcgctagggtgtcctgctaaagtctggtcggagccgccccgaggccgcgtaaagctaccggtccggctaggcctcttcgcttcacccggtcagggagcggccgacgtctggtgcttgcgtctgtttcaagacattggctgtcctttgcaagaatctgagtgggctgcggcatgcggctcagctctaacgcaccttctgcccaaccgccgacgacaaagccctctcagagtcaaatcggtgccagcaccattttgaaggaaggcatggaatcgatgcaccgctcgatttgttccagcagcggtaggatccgtatttctctccggtaagacgtctgcgccccagtcgacaacgacagcagcgctctacgccgcctcctcctcggcgatgcgagcaaagctgagcggcgtgaactggtagccggcggcctggtagaacttcgagtctgcagacgtgcgaggtgacaatcgtcagaggcgagcgggcgggctgaagcaaagtgctggaggggtacgcactgaactcgacccagtggagccggagggcgtgcagaaaggccgagaggccctccatgatgcaaagaattgcgagcgtgaggacaaaccacattgcaaacatgacgacgaggaagagggtcgcgccgacgccagcgcccgaggccttcttggggaaggcgccctcgagcgtcatgccgtagagaacctcggagagctgggcgtgcgcgagcgagagcgcccagagccggaggtaggacgccgtgttggagatgcaacctgacgagagggagaagcgcgacagtcagcacacgaagcgaacatgagcagcgtgacagaggatgaacgcaccgaggcagaactcaatcgtatggataacctggtgaatgacaatctcgccgacgtcaaagccgtgctcgccgtcctcggccgcctcctcagccatcatctcggtcgcgccgatgccggtcgcaatctcctcctcctcctgttcgtcactcgtcgactgccgggcgggctcgccgctgccggcgtcgagcgtctcgtagccctggccgaccgtcttcttgtgctccttgatgatcaggtatggcttgagacacagcatccacggcacgcagacgagcgcgagcaggacgagggccgtctggaggaaggcctggcccgggtagagctgctcctcggggttgaccgtgcccggcgagagaaacatgtagatgagcatgttgaggaggcccggcggcgagacgaggcccggctgcgaccagtcgacgctccacttgtagacgatgcagatgacgaggtagccaaagatcgactgcatgaaaagcatttgcgggatgaactcggcgtagatcgagcggtagtccttgaagcggaggtgattcggcacctggaggcagatggcaaacgacatctgcaggagggaagcaggagcgtgagcaagtcagagtcagcgtattcggaaggaccccggacgcacgtggatgacgccgaggatgatcgacatcttcatcttgtacgagttggtgaagacgagcgagttgtccgagccatgccaggccgggtcgagaccaaaggggtagacgcccgtctggacggcctcgaccacgccggcctcgtgcggccaggcccagcccgaggtaaagagcgacatcgacttggaaaagatgtcgttgtagatgaggccagtaaacatcgagaagaagcccatgaggatgatgatgtagcggccgctggttggaggcaggtagagagaggtcagtcggtgaagccagattacgatgagagcgcgcgccgacgcacaagaagaaggtcgaggtaatctcatcgaggcccgacttggcgagcttcttctcgttgaggatcatgtacctgcagagaagcgtctgtcagcgacgggtggtccctctggcggaaggggcagaggggactcacgatccggcgaggaaggcaaggaagccgtggccgaggtcgccaaacatgacggcaaagaggaacgggaaggtcgcgacggtgaacaggcccgggttgacctcctggtaggtggcaatgccgtacgagtcgatgagcgtctggaaggcctcggtgaaaggcgtcatccggtggtaggtcggcggcttctggtgcgtccggagctcgtacagaatcggcgggacgctggtgccggccgtctcctgcagaaaggggagcgaatcatcgtcagcatgagtaggtttgtcagaggcaaaggagagccgcgcaccgtagcgcggcggagggcgagctggattgcggtaatgtcgcgcgacggcacccagccttcggcgacgagcgtcttgcgccggccgtcgtagctaaggaggttcatcgtctggtagacggccttctccttgagaacggcgtcctgccaggcggcgaggccctcggcgatcttgccgagctcgacacgccgcgtctgcgttgtgttccagacgaccgtgttgacgtcctcgagccggtcagagacctcgcggagggcgtcgttgcgcttgtcggggtcggcgtcgaccggatagagcgtgccgcccatcgactcggcgaccttgcgaatcttggcgagcagctcggagccgtgcgcaaagatgatgaagacgttcttgcgcgtctcggtcccggcgatcgggtcgacaaagggctcgtcgatctcggcgtggttcatgtagaggttgccgcggagcacgcgccagaggatgcgctcaaaggtcgagagccggctccgctcgatcgtgccagagacgaactcgaggtcgtagccggcgccgtagcccgggtcggccgcgccctggtcctggcccgagccatcgagcagcggggcggtgccctcgtcgtcaaaggacgaccggatttccgtgtgccggccctgagcctgaaggaagcactttcgtcgtcagcctcggccgctgtatggggctcgcgagcgtgcaggacgacggacctgctggaagaagacggccgtctcgcggaggacgcagcgggcctcctcgagctcgcgctgcttcttgacgagctgctcccagctcgagttcatctgcccgatccggttctcgtgctcctggagcttctggtcaagctcgtcgatcgcctggggcccgcgcgggccgacggtgatgaacggcgggacagtctcgagcgacgggacgtggatcgcaggtgcggtgaccgaggcgatctgcgtgttgaagagccggaggcgccgatccatctcgtcgagccgccggatgtcgccgacgaatgaacgctggaaggcgttgacctttggattgagctggaggggtagaaggggtaggcgaagcgaaggaggtcagtactgtgatcggctgcgagcaatagcgccgactcaagcgagcaccaagaggcgcagaacggtcactcacgtccttgaattgcatgttgcccatctcgccgagctcgctgatggtgtcgtggacgacctgagggatagcagtgaggaggcagggggagaagcggtcagccgcacgatcgcgaggtcgagggcgaggctctggacacagaagtaggatggcggaacgcacctcgccagggatgaagagctggaccaagctcatctcctccgagcctgtgatagagcgggtcagaaatatcgggtcagcggccgcgatcgtcttcagagtgagagagatgtcgccctcgcgcgccgccgagggaaggagcaagcgtggcgagcctccgaacgaggtaccctctcgctcctgcacgctccttgagcccaggcgagcggtgaggagatgagacgtacgaaagagggaagggtattcggtcgacatgctgggcaagcctgtcgaagtgggatcgaagggagaggtgaggttgtggagaggagcgagggtagcagcgagggtcggtgcggtcgggctggcgagcggcttgcgtagaaataagaaagggtcgggtcatcgcctgcgctgagcttcgagctttgaggtcgacgactcgacgacgatctgccgtcctttacctggcatagctgtcatgctggcgaacccacaggtcgagtcaaagtaccaacgtcctctgcctggacaaaagaggctgatgctagttcggggccggcctcggggcgaagggagggcgggccggaggcgctgcggggactgctgccgctttgctggctcgactcgggcgagggcgtcggtgccggcgagaggcctgcagcgctcacttggccggaacgtcgcgggagtggcggcgggcccatcgtctgttgctgttgttcttgaggttgcgaccgctggctggccgcgccgccctcggcagtcgccgtctcctgctgctggctcttccagctaagctgccggcggtggccgacgccatggacggatcggcttccgggcggcggcgactgggtcccgagatggttcggccctccgccgggcggagcgggcgcgaccggcggcggcatgttgagcggattgaagtcggtcgcgtttgagctcgcgctcgctgccctcgaccggccaccgccaccgccgccattgttaatactggcgctgccgatgccagagccaggcaagagggcgacgcctgctgcccgctggccttgcggcgaacgagtcgaggcgaccgtgtttgagcgcgagaggagcatctgcgaccgaacgggcggccgatcctcggtcgggctcgtccacgcgaagatttggcctgcgtaaaagagcaagtcctcgagcgccgagtccttgccggtcgacagcagccggatatctttgacctcctcctcgccaaagaggatgctgctgaagatgatcgagatgtttgagccgtccatcttgttgtcggccatcgagacgcgccggaggtggtggatgacggcccgaagcgtcgcaacgtggattgccggcagccgcttgaacttttgctttaggtagacaaagtcgttggcaatatgcgtctcacggtcctgcgtaaagctgagccgctcggccagcggccaacggaagacgggctcgggcagctgccgcaggtagagctgcgaagggggccggtctcagctgcagtcacaagctgaacagggcagaaaggcgcgcgtaccttgaggatcgatgcgatggtgtagatttcctcggctcgcgaaaactcaaacgcctcctcgtcaatctcgatccgatggatgagctgatcgggtttgatcgggtcagtatacgcgcaggcgaaggcggctgcccgctcggcggtcagacgcaccgactggacggcgctttgcctcggcgagatccggtagaggccctcggcgttcagcccacggctctcgacgccggcgatgcacttggcgacgagcgtcggtactcgatcggcgtcggaggcgccgatcccgcgcgcaaaggcgtagtcctgtgagcgaggcaaaggcgagtcaagctggagagcgtcagtgccagcaagcgtacttgcccgtcgacgcttcccggacgcaccatgagcgagacgccaaagatcaaatcgcgacactcgccgacaaagtagttggtgtagagcgtcgggcccggcaggtcgcgcgcgccgccgagcgtcgacaggccgccagcgaggtcgccagcgaggctgattcggttgacggcctcctcggaccgcctggcgacctggaaggaaaactgctcggtcgcttggtgcgcgattgtgtactttgaaaaggccgactggagatggatgatgagctcctggacgaactctgcggccgagttggacccgccctggaggatcttctcgagattgatccgcagcgactcgaggtggaagacgccaagccggtactttgcgtcggcatcctcggcctcgcgcttggctttggcagacttgagcgcgccggcctcgttctgctccctcttcttctctgcccggtgcgcggcttcggcccgctcgcgcacctcgtcaacactcttccgcccaacactcgtcccactgccaccgccaccgccgacggcactcgacggcccgccggcataagacgagtgcggctcgcgttcctcgccgccgctccggaggttcgcaaagagctggttgaagccctttttgccggtcgcagcgaggtcggtgatcttctcgcgcgtctggtcaactgtcgcggccgctgacccctgcggaccgccgtacatctgagcgagcgagctcgagggcgcatggtgcggcgtatgcggctgcatcgagggcccagagagaggctgcgacgtgtcctttgagagctcctgcgagagcggcgctcgacgagagtcagcgagcgagcaagcccgatgactcgggaaaagacgagacgcaccacgtaggcctgcgtcttctgaaagtacgtcttctggagcttctggagagcggccgcctgctcggcgtagcgcgcccggctgttcttgacgtcgtcggcgatgcgcgaggcgatccgctgctgggtattctgcggacgcgatggcgacaagagcaggtccaccagtcagcgctctgccggacactctctggccttatacaagagggcgcgttggttgtggcgtggacgcaccttgaggttggtcaacggcgcgaggacctcctcccggatcgcgtttgcaaacgcccgccggctctcgacctcgtgctcgctgttttcgaggatttgtcgccaagcccgccggacggtcggcagcgcatcgcgctggttgtccttcctgcgaggtggattcgggcgcagaagaggatcagcgctggacggacagacagacggggatcgatggccgagctcaagggctgcgcgcttggcaccagggaagcctgcctgcgctgagagggagaagggggacgtacccgagggcgtctgtgccggcgtcgagcgctcgagtccgctgcgtcaggagctggagctggtccgcactgcgagaagaggtgggcagggacgtcggccctgatcaggacaaggacggcggtaggctggggcgggcgagggaagggcgatggactgactacgtctcctcgagtcggacgctggcgagagtcagggaggtctcagaatcagccggctgtttccgccaagatggtcgcagagagacgcaccggccctcgagcatccacaggtagtcggtttcgaggctcgactggtgctgctggaagacggtcatgaacggcacctggccgctcgagggcgaccggccggctcgcgacgacgagccgctgctcgcgccgtggccggcgtcgccagaggtaaagctccctagcggcggccgaaagtgggcggacggcgtcggatagtggttctgcgacatttccgtcggacgctgagatgaggggaaggtgtgatggaggaggaaggggatgggcgaggaggagggggcgagaaggctgttgtcgggctgagacgacgacgcgtccggcccggtgctgcgcgggcgtgatctctcccccgtgcgccgaccggggtgacgaccggtcctttcgcccctcgagaagacagagagcaaaggtgggcatcgagatggtcacataaggcagggcagatagctacaggtgttggtcgcaaggtgggcggcttgatagggagcaagggggcaggacaagaggggagcgcacggagatcgcccgccgcacgatacaggtttgagcagccgacgacacgaccgattggatgtgtggcgggcgagtacgagagggcgccgatgcagggtgtagagggcgcggcttggaggctctactcgtcttgcctggaggggcggtggaggggaagattgaagcgcgtcagcccgcacgacagccacagcccgaatggaaaggacgcactcatcgtaactggagtctacagccccgagcagaagcttcacgagatacaaatcgggggtcaattcgaatccagacttgcgcatcatctggagctcgcacatcgtcggcgaagtatgggttagctttcgggccaagaggcctcgctcgagccaagaggctcggcttcggacgaagcgaaaacgacgcacctcctcctgctcagcctgcagggtcagatcaggtgcgtgaggcgaaacgtcagcgctcggtcaggcctcgatgaaaaacaggaggccgcgggggcacggacctcaaagggtgagatgcctgcggggaagggattcgagcggcgctcgtcagcgtcgcgcacctcgagcaggcaggggagatgctgccagcggctcacagtcgaccaagccgccgacaatcgggtgcgtgtcgagctcgttgaggaaggcctagcagcatggtcgtcagcgctgaagccagctctaagagtcgagagagggaccgacctgcgccttcgagtcgtttccgaccattgcgaattggaacgagatggcgtctggcccatagcgcgtccgctgaagctcctgattggcgcgcatgacggcgtggacgatctgcaagagcagatgggaaagtgtcagcagaaccgccacgacgtaccctcttgcacaacctcgcaggacacgttgtggccacgcacacacgagtttgtagggcttctatagggcgccgcgctgttagcatcaagaccgtatgcgaaattgctcaagcttgcgtcagatccatacagatgtgccctggatctttggcccggcgcgttgaccgtcggcatcttttccgaagatttccagctgtctcgtcgagcatatcaggcgccgggccgacctcgtctttacggacgcgagcgccattgacatggtcgactttgcatgacgtcactctggaccgatacgagagcgtacacgcggtgttgcgcgcgatttcaaatcccgtcttgcggcctcgacttgaaggtcgaacacatcccaggcgttgacaaagtcccggcgggtctcctatctcgtcaagcggtctgcctgcctccgcgctttcccaatgttgaccgttcaacctaccctgaaagactttgaacgaacaataacaaagtaatctcgatcgagaaggtgagaaggacggagccgacccgtttcttgcaggccctccgtgccgccttccgatcctgttgtcactatcccgtcatgcacattttacgggtggcaccgcatggctgagctcatcgggaggagcctctgacgccccactccgccaagaaggttagccacctattgcgctcacacgcctcgggcgctcatacgtgttgatcgaccttcgtatcttgaatctacagggtccttataacgggcgaagcctgccctagggttatcacatgacgcgctggtcctcgggagttggctgaggtcagggctggctagagtaacaaggggactggtcgtttggatgcggagtctcaaatagggccagactcaattatttggccggcaccaagttgggttggaccagcctatataatttgagagagtcgtcgtgatagccgtgacgatgaacgctggaagagttcctaaaccgcagataagggtagaagtcggccagaggttcagaatggtattgatgatcaaatatgctgggaccgccgtcaaagaacgaaatagggaaagctaaggaaagagcgacgaccggccagtgtaataaccgtggggaagatgcgtatgacgcgacggagctggagagagtccgtcagacatcaccatgctagcaaactatgggacccttgcgtcttagcgatttgggccacaggaaggctcacagagcctctgactagctggccactcagtcaagactccaacgacatccgaaggtacagagtactgatatgggacaagtgaagcattcctaaggactctaagctacctggcgcacttggtctggaggctcaccgcctcctagttgtccttctgggccttgagcgaccgttagcactgcaggcaatgacaggacgcaaagagcggtgggcgggacgcaccagtcctgggcaaagtcattctcgccgcaagcagattaacgtaccttgtcgcagacgattgtaactggctcgaacggcgaccgccgccaggagtccccgtacgtggcagccgacccacacaactggatcatacaggggccggtcagctgaacgccgctgctcttgcgcttgcgcttgcgcttcgtcgccgaggagccgccgaagcccttctccttcaacgttgaggggcttgttgagagaaggacgaaacggaatgagctacctagagtgggggtcaggacgtgttacaagcggtgagcaaaaaggcaagaggtgggactgaactcagtcaccaagaagcggaccgaggtctaaagaggaggaatgccgatgcgttccacgcgtcaggaatgcatcggcaggcgcgcggcgccagcgcgcgcgcagccacttgctgccgccgctggctctgctcgccgcgccgcactcgtcgcaacttcaacactccctctcgatgagctgcatcgtctgctccctctgctccctctggttccggctgggaaagggcgagaccgtgcccccggagacccataccgaacgagaagaactgatgcttcagccgacctaggagcttcgtccccaagtcggccagcatctggttcgttggcatcgacacgataacgaccgtgccatcctcgaccttgtcacgcgtgaagtgatgacggatgtcaatgtgcttcgagcgagcgtgcgagttcgggttcatggcgagcgctcgagcgccccggttgtcctcgtagaccgtcgtagggccgggagggaggagccgcagcgacgccaggaccgaccgcagccagatcgtctccttgaccgcatgagccagcgcgacgtactccgcctcgcacgtagatagtacgacgctctcctgcttcttcgatgcccagctgatggcgcccccgttgagcatggagacgtaagcgctgggtgagcggcggccgtcgatatcggccgagacgtagtccgcgtccgagtagaccttcaacgtcgacccgtttctcccgcccgcgccgtaggtcagcgcccattcttccgtcgtcacgaggtaagcgaggaccttcttcagcgctgaccagtgcgtcttgcctaggcaagccgcaaactgggccagccggacgacggcaaaggagaggtcgggccgggtgaccagcatcacccacagcaggccgcccaacagttgagcgtaaggtacgcccaacatctccctcctctccttgtccgtctgtgggctctgggccttcctcaggagcaggctggggtcgagcgggatgaccaccgggtggggcgacgtcatgtggtacttgacggcgaggtgcttgatgtagggccgctgggagacttggagcgtccttcgtgaccggtcgcgcacgacctcgatgccgaggcagaagcgcatctcgcccagatccttgaccgtgaatactgatgtgatccgcgccttgacctcgctcaggatcttgacgcccgacgcgaagaggctgaagtcgtcgacgtagacggcgagatgcagctcttccccctcccagtagaggccctggtcggccgtcgaccgctcgaaaccgatcgccgtgagtgcctcgtgcagcttgaggtatcactgcctggccgcctgcttgaggccgtagaggcccttgtataggcggcagacccagtcctccttgcccggctcctcgaatccagggggctgacgcatgtacacctcctcctgcagttcgccgtacaagtaggccgtctcgacgtccatctggtggacctcccagtcgcgggaggccgcctcggcgagcagcagccgaagcgttgtgagtttgaccactggcgagaacgtctcgtccgcgaagtagtctttgccctcaacctgactgaccgcctgagcgacgaaccggaccttatagcgaaccgtcaccccttgtgcgtccttcttctccgcgagcacgtctcggcagcccacgatgttgacgccctcggcctgggcaccagcgtccagaccttgtgcttgtgcagcgacgccatctcaagttcggctcctgccctccaggcggggccgttcggcccgcgcagcgcctcggacagtctttccggtacgcctgcttggtgggctgctgcgagggccatgacgaaagctgctacgcaaaggccgttgaagctgaccggctgtgcgtgttcggtcccggcgaaaagggcctgcaggatggccgctgacgttttcccgccgacacccatcccaccctttgaccacctgtcgacgaccttcaacttctcttctcctttgtcgactgtgtcgtcgaccgcgagaaggcatgcctggtccgtccgatagcgtgcgggcctctgccgcgaccgtgctgtgttgcgccgtgcgacgacgacctaacctctctggccttcgaccgggatcccacttgcaatgccagtgtcttccgaccggccctcaacgtcgcccgacggccatttgtctgcgattatcccatccttggagaggacctccccgggggcctccaaagggtcaactcggtcgtttccgggggtgggggggcgacctccggagtccaaaatcgtctccctcgccgcctccggactcggcggccggaaggaggcatctgcttggaggggcatcgggcaggagcagaggccggtcgcggtcgcgaccggcgccttcaatctcgacctcttcgaccgaccccaccgacgatggaggccccggtacgtgcccggccggcgccagcacaggctccggtccctcttgcacaaccacaggagctgactcgtctcttcctggctcggcagctcgatacggggtgtcctggccgttctgctcgtcgcccccgagatcgccctcccccattccggtgcctccctccagcgacacttcatcccagcggtcgaccctcgccaccttcgtcatggcgacggaaccggcaatgacctcgcggccggcgcgctacaatccggccgccgcctttgatcctccgcggcgcatgccgcttcgccctgtgcagtcgcaagaggcctttgtcgtccgcgacatcacgaccctcgagcccgccgccgccgagactggcgtctcctttcacgtcggcatccctgtcctctttcacgcaatgggtcggtcaaagccgagctgtttcggacgagccttcgtgcgctacatcggccgcctcaagggcgagaagggcccgtgggtcgggctcgaggtcatcgaggctggtctagagacgatcttcccgctctttcgggacggcacgtaccgcggcgtcaagtactttgagctcggcgaagaggacgagcacaactggcacagcagccggtcggtcctcgagggcgagcgccgccgaaagtcgagcggcacgtctgtcggcacctcgaccgcgacgtccgagtcttccttccactcgggttcacaacgtcgtctgaccgatcagccagattcggtcgtcggggtcttgcggccctgcatctttgtccgcccggccgatgtcgtgcgtttgcctggtcggcttgtcttctttgcgagagatgctgacctggctggttctcttgttgccaggcctgggtcaacccaaactaaacttgtcggcctcgctgctttgcccatctctcatcgcgccttcagctcgcacttcataccccttttccgctcgccgactgtgatacctcgcccccacataccatcgcacatccgagccgatttctcacgatgccccatgaatgctcgctcgtcgttcgcatgtcgccagtcggtctgcagcgcagagatggccgcagccgcgcaagatcattgatgcaaccactccttctggtcgttctccctttgaccttagaggctctgcgctcttgccgagcgctcgaaagtgcagggccgccaccgagggaggcgtcggtcaactcgtggtgctgcgcagaacgacggctgcatgcgaccggcgcttccgcccgagctcgaagctcggaagccgccctccaacactcaccctctccctaccacgccctcagccttggcgtacgctccgccgcccttcctctgctccgcttcccgtcactcgccgccgctcagccggctctcgatccatgtcaaacatcaaccgccgaacgacgccggtcaagtcgacgccccgagccttcgttcgtccgactcagctctaaccgagggcctcgatccccccgccgaggcgcatatccgtactgatcaggcccctctccttctcctaggcaagggcaggaacagtgctgctcctcggtacgtgactcaaagacgatgggaggcgtggagcggcgggggggagcggaagggggagcaagccgccggcagctcaccttgcctccctctccccgctggcccgcagtgagcaccgtcacctactactgggtcaagggtaggatcgacgacaacaggctcgagtttacccggccagagaaccgcaagtcgcggatcctgacgtgtacgtccgttctagctctgtccgaccgtgcgcggccccgagctgaccgctgtgaggagggactgcgcgcgggccggcaggggaggagcgcgctgccatggacgccgctgaggcacgcaaggagctcgaaaagctcaagacaccctgacgatcggcatgctgctgctttcatccgctgcgctcttggcgccgacgagaccagtcgcatcgagtcaaagtctcggcaggatcgaggggtgatcatggcatcatcgccacttggggcccgtcgtcttcttcaactttgcagctggagaaggcgttcttcgcactctcatcctcgcgggctgctcggctctgggcgcaacggcggccgctggctccgtgcgcttccgcgccggtccatgcgatgacgccgtctcagcgaggtggtcgaggatgacctcgcgcaggttctcgagtgtctggtggcgacaagcaggcgtcagtgacaagctccagcattgcaacaagacggctcgtggcccagctttgacaaaaggagagaaagcgcacctcgtctcggagcggaaacttcctctgcgtgctgacgcagacggacggcaggagccgtcccttctcgctcgcctcgtcctccactgtccacgcgctctcgcgcgcagcctggatcgcccgatcgagtgtcgatcgcttgacgttgatctggcgggggtcgacggcgtccgactttgtaaaaacggggaggacgggcaggccggccgggagcgaggcgaggaagagctggtccgagggaaggagcttgtggtcgagcgggtagaggacgacgagtagcgagggcggcgaaggtgggtgttgcgtcacatagtctgcgaaggaaagtggcaggatcgcgactacgggcgtcagcatgcgaaccccatcatcgcgggccggctctggaactacgcacaggagaacagctcgccccactctggtcgcccacgatcgccgtagccgggagcgtcgacgagcaccatgcttcctccaacgtcaaagaagttgagcatcgtcgtgtggccctagcatagacggaacgggtttgaggggtcagcaagagcactaaaggagacgtgagcatggaaggggggaaaggaccgaccgctctcgacgacgtcttgacgagcgagtctgagcagacgagagcattgatgagcgaggacttgccgacgtttgatcgtccggcaaaaatgatctctgaagggtagggaggtcggccggcaagagagggtcggtcagcttcactcggcctggatggggcgtgggcggtagccgactaaccctgggcggcgcctttcgccggaaggtactccttgcgcgcgacactgacgcggaagcgggcgttgctaaatgcgcccttgagactcgtccggcggagctcggacccctggccctgagcgagcgacatgcgctttgcctggacctggttctgcggataggtgatgtgccgcggctgatcaaagacgagcttcggaccgagctcggctccagcaggaggcaatgaaacggcatcggcccccacttgcacagcaccggccaccgtggcagcgacagagctacctgcggtcgacagaggcggccggacagacgacgacgacgacgtcgtgctagaggctttcgcggcggcggcggcggcggccgtcggtcggtggaacgcgctcgtcgggaagggcgcggttgagaatggcctgcgcgaggtcgaggccagggccgacgagcaggcgtacgagcagcagcgtgcggtggccatcttggctgatccagagggggaagcgaggcgagcagcaggtcgacgtcgacaggtcggtctgcgtccgagtcccgggagcgtaaccctaagcggccggctgaccgaccgacggctctcgtgctgccatccgccatctcgcccctgcaccttcaccctcgttctcgctttcttcatctcccactcgctcactatgtcttacacccttcctgaggtacgctcagcatcgagcaggctagccgctcgctcgtcgcttttctccgctgacacgcccgtgcctgcccttgcccgacaacccgactcatcacctttttcgccgctctcgcccagcttccgtacggctacgatgccctcgagccctacatctccaagggtccgtcttggcaagactgcaccgctctgctagcacctcgctgacgtccctacctgtgtcgcctttgcagagatcatgattctccatcacaccaagcaccaccagacctacatcgttcgtccgccctgaccgggagcacgcgcgcgtcgtcggccatcgccttgctgactggccctccctccaccttctgtcagaccaacctcaacgccgccctccaggcttactcgcagacgactgacatcaagcagcagcttgccctccagtcggccctcaagttcaacggtccgtcccttccctccccgtccggcgtcgacctcgagccagggaggccatgcgcgacatctcgaccgttgttgctaaccaaacaccccatctcgctctcgtctggcaggcggtggctacctcaatcacgtcctcttcttcaacggcatggccccggcctcttcgcccgactcgaagctccaggacggctcgctcaagacggctattgaggccgactttggctcgttcgagggtacgtcccgcccctgtggcgtcacccacccttccccggtcgattccacccgaaccgcccgattgacccctcggttaggcggcagattcacaaccggacgccgtcgtctgcttccagtgggcaaggtttgagctcgatccgacaagatctcgctcacactttggaaacccccaattgggacccctttacctggagagtcgtcgtagggaagcgagcatgctatccgagcgccctctggcgggcgctgcagtgggagcggcatcgacagcacggagttaaaaagagagggaggggccgggcagaaccgagccgagccgaaggcgagtgcgggggcgagtacagagtcggggcgagggcagaggggggcgatcagaagaaaatgtaggtcatgacgaagacgccgacgcagagcgccgcgacaacctcgacgggcacgccggcgccgacgacctgctggccgtgctgctgcgtctgctggccgctgctgacggccgaggagtcgtcgaccccgccgccgcgcttccggagaccggcgacggccgtcggctgctcggcaagctgagacttgaggcggcggatctcgtccttgaggcgctcgacctcggacaacgaggtggaggtagaggtggtgatggggaggccgtcggttttcggcgcggcggcggcggcggcggcggcgtgcgaggtggtgatgggaggaagggacgacgtgttgagcgcgggtgcgagcgcgggcgcgacagccacgttgctgctgctgctggtcgcgaccggggcagcgatgctccgagccgcagcggccgttgacgaggtggagggcgagccggccgaggtcgggagcgtcgtgtcggcctggtggaactgggtctgggtagcgtcgggcgacgagacgccgttagcgtgcgtgttgggctgatccgcgccaatcgagggaggcaagttgaaagtcagcggacggcacgctaggacgcgagacccaaaagaaagaaggaaggcaacggaccgatccgtcaatcagcgtcgacttgtcaaatgtctcgtcggccattcctgctcctccagcgtgctgctgcgagttggcgatagcagaagcctcctcagagtcggcctcgacgtacgcgcaccggatcttctgctccgagatgcgctccttgccgccggcctctatgctcgaccacttttattgcgtcgcgatcaagcccaatcgagagtgcgcaaaggggatcagcatcctcgacgcttttgagaattcctcaacggcaaaagcgagggctagagggaagagggacggacgatctctgcgagagcgagatgctcctgcgacgcatcgatgatggccgactgtacgagaaacttgtccttgcactttgcgcccgggggcgggtcggcccgcatgggctggaggaggactgtccgtttcgaaggaaaagagagaggagcaagcggtcagccggaccgcttgcaggcagggaaaatgatgggtggatgggacggcggacggaccggagacttcgaccgactcgcccggctcaatccggccggagttggggcgaacgcagtactgcagcgggcgggagagatgcagagaggccagtcaaatgggtcagctgtgttggccttttgtcacgagaagatggtccgaagcggtcgaggtcatccccccccgatctcttataccctgcccgcccgagagctcatgcccgcctgctcgccctcgaggtcgagccggaatgtgcctccttcacaccttccgaccgacccagccgcccctccgccggccaacagaccgacgcagcgcgctccagagggccagcgtgcgtcgcctcgcgccagcaaggaccctctcccagccagcagcgggtgaggcgtgcgtgcgtgcgtgcgttttggtcggtcgatcggtcggtcggcgctcaactttcgcaaaagctccagccagccagaccgggaggggcgagccgccgattgaccggacccgacccggcttgactggatgcagcttgaccaaccagccaggccgacgccaagcaaaagaggaaatcgtcacgcgcttccaagcccagagcgagcgagcgtgtcgtccaacctcccgcccagcctggccggcagcccggccgggcctggctcgaccgccagaccagaggatcagaccaggctgccgctccctccgagcggaaacgagcgaagcgtctcgcctcggacccgagctgccacccgcgggttcccgtgcctgcctgtctgcctgcccgcctgcctgcacgggctgggttgggcgcaaagcctggccgggcgagctaggagtccgaaagccggcgggtgggcgaggggcgagcgaaggggcgatcggggcggggtaggccgcgctgcctgacacgctcgcttgtcgttccgtccctcgccttcggaggggcggacgagcgaacgtccacatcgcaccgcacagccctgcgcaaccagcccagccctagccccattgaccccaaccctccgaacccgtcttgtcccgccgcccatttggccgactggagctcggacgactcgaacgaccgagtgctgtctcgcctcgcccgagcctcaactcctcctccgccgcccaagcaagcagcgacgcaagagcgtccgcacattccagcccaatcgagcgcgcgaaaaccgccaaccgagccgccgcacccgaacgcgacgagctcaagagacgagggagtgaaagagcgcaggggtaggaggacggacctgcttcggtgccgtcgtcttaaccttgaacgcgacgctctcgctgtttgagttgcggacgacgagcgtgcgcttaacgagggacgtgagagggcctggcgggcgggcgtgcacaaaccgttgtgggcgagtgaagagaggaagcggtgagggaagggagggtaagaggatgtcagtacgagagaccagggcgggatgacgaagaggagatggaacaccgcggccggcgcctgctccgccctttctctctctccctttctccctctctttggcccaggacaaggaaagcagacagggaacgtacgcgggaaagcgagcgtgcccgcaggcgtgaggtcgaccgacatttgcttcttctcgacggttgcgggagaaagtcggagaggaggagagcgaagggcgaggggcgagaggcgagggtcgatgaaaggccgagagcggggcgggcgggagcacctcgcgcgaggacgagcctgcggatgtgcatcgtccctcttcctcgccgtacgcatcggaaggcccgtcatcttcgtatcttccgggcggaggacgttcacttgcttaaataagagcatctgttctcctcgagtgactgccgaagagccctgctccagaagggctcgaccccctctccctcgcttcagccgacctcaatcctcctagccaagccaaaccggccccccctcccctccgacctaacgggcagagctcaaaagcagcactagagtcgcgccaggccggcccattcccgcaccttcctctgttttccgaagagaaacgatggtccatcgaagaaggttggcggttaagagggcgccgttcttaggagactctggaccgggcggacgagggagccgagcgagcggatggaggcgaacagggacagacgaggcgggatagcttgagagtattgtgagagccgagcgcagagccgactcgctggctggggcaagacggccagtctagagaggccgaggcgggtccgagagtggaatggggggtgggcgggcgatgcgcggtcgagaaagagagaaagaaagagagagagagtgggaacgtctcgaggcgatctctagtcccaggcggccttgacaaacttctcaacgagcgtcgggtccttctgtctcgttttggggcgccgaaaaagagtaggtggaagggcggaagattgaggtagggtccggaaagtcgaggtcggaagaggaccatcggaagaggaccaaaacgggaaggaaggcaaagggggtcagctcttgtctgccctgattcacccggtcgtccgtaagctggaaagaaggagcggagcgaagagggagggggaggagagtcgccagcagctggtgggaggccggccgacaaaacgcaaggtcaagcgagcgagtcgaaccgtcgtcgctgtcctcgaaccgtcggcgacggacggcgatgacggcgctctcgcactcgcacttacttgctccgttcgtccttcgacacttcacgaaggacccgcccccggtccggaccgaaccgactcggccagtcggccggccgggatggagggagggagggcagcgcgcgcaccttgatggcctgcatctcgaggtcggccgacggcaccggttcgcagaagatgacgcgcgaagccgaggcgaggttgaggccgcgcgcaccctgcgttagttcgatcagaaggacgcgtgtgcgctgacccgtctcgaacgaggagactgagcgagagtccggtcagcgtcgctctgcgtctgcttaaagtcggacgcacctgtccgctggcgatcgttgcggctcatgatgccaccgacaaagtcggccgggacaccgacgaggtcgagcgcctcgatcactgcagaagggcagagggaatgggtcagcaggatgacgtctgagttgccaagttgggaccacgtcggctcacgcacgcagaccgagcgccgaagcgtcacggctaaagataagcatcttgtcgtgctcggcgtgacgcaggacctgaacaatttgatcgaccagcgtcagccctgaagaaggacactcttcgagcgggaagacggacctcggcgacgataaagttgagctttgacgaggcgctcgagacaatccggacatcgagcagcgggaacgaggccgagacgacgggcgtgaccgggaacgggtcgttgccgaccagggaccgctgctttgccttagccatccgctgcgtctcggccgcctgctcgctgctccaccaagcggccgacatgtgcttgcccgaggcgagctcggcccggcgccgcttcgcataggcctcgtcggcctgctcggtccggccttcgacgatcaggtaggctaggagctcgcgcgggtccgcctcggggttggccgcgacgtgggcgacggcaaggttgcgaagccggacgagcttcgctggaagcaagaggtaatctgaccagccctcgggacggacaccactccaggcgcgggcgagctcgtcgtcgaggccagcgacctgggccggtagtgacgcgccaaaggagccgaccagctgcagccagacgcggtccgagcccgcccgctcgaggtggaggaaggtgttgcggaggacgacctgatcgtctctggtgtagttgcgcttgccctggtctaccgccgtagcctcgtcgtgcgcccaccagcgcttgttgtcgacatcaaagacgtttggcgagccgagccaaaacgctgcgtacgacagattgccaaagaggtgctgcaggctggccgtcgaggcgctcgaaaagagccagccgtcgccggtccgaccggtcgagagtgagttgacgtgcatgatggcgagcaggacgttgagcgtcttggtcgagaagaccgtcggtctgagcgcgacaggcgagatgtcaagcggcggtaggggtgcatctgagcggtcctcgagccgatgacggaccatgatgcgctggaggaggacggcaagccggccgacggcgccagcctccggaacttgaccggtccctgcgcggagcggggcgaccaagagcgacgcccatgggacgtttgacagtctgccgacctgcaggaagtcgcacattgcctggaggcgcgagaggtcaaccttggcctgggcgggccatggctcggcagccgtaggctctgacaggtcaggcgcacccaggccgaccaggttgggctgcagaacaagaggtagcctagcttcagccatcggctcgaagtgtccgccgtaccgcagccgcacgcaccgtcggcgtgccggagacgacccagactcgctcagcggagagcagcgaggccagacagacgaggtcgctcgtctttgagctcgcgacgtggccctcgtcgacgacgagccgcttccacctgtggacgaaggcaagaagtcgcagaggatcagcagccggccggtcaactggacgaaagcgcgacgcaccggacgcggacaagcgggcttgcgggaggcgtgctggtgcactgctcgccctcgttgcagccgacgtctgcgcgacacaggaagcggtggtcagcggctggatggggaggtttgtcttttcgacatgcgagcccgaacgcacaacatttgcgagggcgcgacgttgttgacgccgattcgaagccgccccgctggttctcctttgcgaagcagccgtgcgagaggaggacgaggtcgtagtcctgggccaggataccagccgcggggaggtcggcgtttccctcgatgatgagcgagcgcagcgcgccgtcctcgacgtgcttttcgagctggaggacgaacgggatcagggtaagctgagataggaggacattgcgagccactgcgcacacaccatgcccttccactgcgggagcacgacggccagcatcaggcggctgtcagcaagagagaaagcgcgtgcgacgctcagacttcaaaagggcgcacctggagcagcaggttatccgggacgatgacaagcgagccccagccgaggaggatcggaatctcgcgacagacgtcgtttgcgcccattcggccgcgcatctcgcgcgccggcgcccaaaagtagggctgctgcgagccaaagtcgagcaggttgaggtaatcgcggtcggcctgcgggagggcgctgctgctgcctgacccgacgaggtccgaggggtggatgctttggaacggcgaggagaggagtcggtgggctgccatgtcggtcaggcgggggacacgtctggatgggacgttggcgtcctcctcggttgggggccgccggagccacgacgtctcgacgcgcatgccctcgggcacgtcggcccgctgcgactttgtcgcaaggattaaggccaacacgcagaccgtcttgccgaatcccatctcctcgcagaggatgccgccccgcggcgcggcgaagcggtcgactgccattgctatcttgccggtcgcgggcgagacaaagtagggctgcgcgcgccggccgttgggaacgtcaaccgactggagctcgacgaacgccaggtccgagaggggcgggttggcgagctcccagagcgccatctgcttgacgtcggtcttgcggcatgaagaagagagggcgtcttaggatgcgtacgacaggtgagggatgcatggcgccgacgcacgacctggtacttgaagagccgcgtgcgcatgcccggaaggtcctggtcgacctcgcagagcagtcgattgaccgccttgaatgccggcgagccgaccggtgcgaacgggacgacgctcgccgggttcggcgacggcagcgtcgagtagagctgctggagcgagcggccgtcccaggcgacggccgggtcgagtgccggttgagctgtgagaagttggccgtccgcatcgagcgcgacctcgccctgccagagcgatgtgctacgacagagctcgacgaggacctcgacgaggagtgatccgagctgcttggccgcctgctcggcctgccgtttcgtcagggcccgacccttgcccttcgggccgcctgcgggcaggcttgcctgcgccgcccggtcaggcaggaaggaaacacggtagacctggccctcgaccggcgaaatggacgtcagcgactggacggcagggaccggctcgagctcgagggcgagctgctggcggagacgctcgaccttgccgagcaggggcgagtcgagagggagcggctgcgatgtcgacgacgacgaaggtggcgagctgccggccggctgagggacgtagaagctgccgacgggcagagccgtctggagcatggcgagagactctccttctgacgttctgacgagacgctgcagggtcgagatgaaatgggccagcccggaaggggatggcgggataggggcacgagccaaagcgcttctctccctgaccacgaccttgaggactcgacgtacggtcatccgaagaagcaaaggcagcaagaggaggcagagacgacccatcgagcagagcgcatacatccctgtccatcgtacgtgcgctcttggcgcaggaggtgaggagatgaacgctcaacgatcctgcctggctgctgacttgtcgtcgtcgtcggcccgcagcagacccgtcttctcagcatgccgcccaagccagccaacgccgtcagcgccggccagccctcgctcgacacctggctctcaacgaactcgtcgtcctcagccccgcccgcaggcgactcctcgcgcctcccctcgcttcagacccactcgccgcccctgctcgacaaagactccatcttcctcgcctcaaccttccccctcacagcccccccgaccacccactcgctccggacgctcgtcaacctccacctctcgccgcctcgcgcagaggggctgccgggggcccccctcccgtccgcagcttattttgaaagcttcgtcgaggacaagcccagctccacaacgccaaccgtcgcctcgctctttgacggcttagcgacccagtcagcgtccaaggaaggtgccattcggctcgagtgaggcggtcgcccactgtcaaggacttgccaagaagggcttcgcgactccctttccttgccggtacctgcacccctcgtcccaatcacatgacgctctttgcccgcggcatgcacgaccctacaaggtctgctgcgacatcaagctggcaatgctccctcttgctgtctactcgcgacttgtcctgcctgccatgacctgtcctgaccggctggtaccgtcggcttcgagagtcggcgggtcggctccgacaagagtgcgccaccagatggccccggcttgccctcgacttctctgaacttaagctcgtcagcctctgaccacatcctcactcttcagccatgtcgtggtacattaatttcgccttcttcatcggcatgctcttcatccatgtcttcgccggcggccagaagaagctgccgacgccgtcaaggacatcgggtgacaatcccatcgatgccgcctcggccgccgccaccgccgccgccaccactccctcgcccgacgccgctcttcagccagagcctctgaaccaacggcgggtgacgcagggaatggtcatcctgacgctcaccatgcacgtcgctgcggccgagtcgttcggcttcagcttcaggcgggccttcgaccgactcttcgagagctcgccgccggctctccccgagccctttgcgtcggtcctctcgttcgtcttcttctcagcgtcggcctggctcatcaagcccgggctagtgaggctcgtatgcgagcgctggctcggtctcaacgaacgatcgacgatggtcgtccgacgctgggccgacggcttccacgtcgtcctgacgccggtcgtcgcgctcgccctgctcctcggctcctcgacgagcgacttcgacctcgcgttcatcatcgcaattagcgcttctgtcctcatcatcgcccctttcgcctgtctgtctgttgatttctgtgcgtacaattcggccgaggtgcggtccgttgaccgccgtgagctgacgctggccgctccatctcgtcgccagcctggtcgcgggcgctcgaccccgagggctgggctcgcgagcaggcaaagaacgaggaggcaaggcggctcaaacgctttgggccgccgtgcgcttgcgcgcagaagaaggtcgcagacgaggcgcaggctgagtagtgggccctggccgtgtgaggtcagacgctggcgcccgaggcgttccatatccatgcttgtgctcgacggccgatgcgtaaggaaggcggtcatgacagagacagactacaaaggcaggcgacggtcgtcgacggcgggaaaggagaagaaagccggagcagatggtcagagcttggccatcgaggcgacggtctggatgctctccttggccgtcctgaccatgtcgtcgacgatctgcttggcataaaggatctcatcgatcgagccggcgacggtgcccatcctgagaaggcagcgcatgcggaacgtcagtcagaagacgagttgcatcaacctcgacgagacgagacgcaggggacgtacagccagctccggccctggagcgacttctctgggtggctcttgagctcgtgctcgtgcgggatgatgcccgagctcgtcagctgtttgatctcgtcctgccggttcgtctcccaatcggcgacgtagggcgtcttgcggactagaaggggtggtgtcgaaagggagtgtcagctgacagcgttcaaagggaacgtcgggcagactgaccacggagaggccggccgctgagcaaggcgaggcatgaaggacgtcagcacccctcgagctggcggaaggaagcaggcgacgcacgtgtagatcaacgtggcagcgacatcctgagggcgagcggtgtgagagtcagcaacgacgtcccgatccaccgctagcgagggcagcacacgtacctcgaactcggcgctcaggatctgcttcttgtggtacctgtgacgagagggccggatatcagggtcagcaacttgagcttggccggccgccagagacaaggaacgtactctggcgcgctcgcctcctgtgacgcgacaaagcgcgtgccgacccagacgccggcggcgcccataatgagcgcgttggcgaggcccttgccgtcatggatgccgccggctgcgatgaccatgatctgctcgccggtgaggggagatttgtggcccttgacgacctcgatgaccttgggaacgagcagcgacgtcgggactgagaaacgcagacacggagggtcagtcgacacgttagtggcgcagaagggagtggatgtggtgagagactgaccttgcgtctgagagtgaccgcctgcctctgatccctgcgcacagatgatgtcgaccccagcctcgactgcgtacttcgcgtgctttggcaggcccaccatgttcatcacgagtatccctgcgtcgtgcagggccttgaccgcctcgggtggaggaacgccaacggcgcagacgaagagcgaggtcttctcctcgatgatcacctggataaggtccatcaggccgcccttggtgtagtcgtagttcgtcttgcgcgcttccgtcccgcgcggcgacttgccgacggccgggatgagcaggtcgacgccgaacggcaggtcgggcgaggcaaggccggccttgagggcgtggatctgctcgcgaagatgcttgggcgtctgcgagaggagacagcggcatgttagtcgctggcgaggagcttactatcctctgctggccaaagggacgtacgtagcctggcagagacaggaggtgagcggcctttagccccgcgagcagacgacctccgagggaagcgactgcgactcaccgagtccgccgatcaccccaatgcctccggcattcgacacggcagccgccagctcaggtccagccgcgacgttcatgcctagaggtccagcaggtcagcaagccggagagttcggtagctcgtgctccgagctgcgggcaagccgccgacgcaccggcgagcgagatcgggtgggcgatcccaaagagtttcgtaaacggcgtcgcaaacacttgcgacgaggcattgggggcggacggcatgctagtagtggctatgagtttcgtagagagtggtggcggagggcaggagggtcggtcggagggaggacaggaggaggggaggccggcaagcaccgggccgagtcgaaccggaggcttaaccctaagtcttccctaggcgcagtagtttgacagcgggcatacaatcgggagggggtcatcagtcgccgaggccagagcgcagaagagtatagagggcacggggaaaggggggatcgtcaaacaggcaaagaaaggggcgtgaagggtcaagaaagggcgagcgcgggcgtcccaggtcaacctcgctatagcttcgcgccctctggcatgtacttcattgcctgccggacgccgaggtcggcgaggatgtcctccgcgccgccctgttgtgcgtggaagagcagccgagacagtggtcagccctgagcgaagttctgtgcagaccagggtgcaggcgacgcacgaggaccgcgtcgaacggctggttgcggctgaagccctcgatgactgcaggcggaaccgaggaaggcgtcagtcggcactctcagcagccgatatcaagcggcggtcgaggacaggcgacacacatttacccatgccggtcttggtgagcgagcggccgccgaagatctgaacggcgtcggtcgcgatgtcacccgcgcagcgcgtcaggtacatcttgagaagcgcaatctggccagcgaggtgctggctctgttcggcataatccatcttgcacatctgatacgtgatgttctgtcgaagataagaaggttggtcaggacagcgaaaagcgcccgctgcgcgcaccggcctcgcgacgcacctcgagccacgactggcaggcctcgaccttggcaatcattgacgcgagcttctggcggatgaccggctggccgatgagcggcttgccaaagacgcgccgctgcgaagcccagacgaggcactcttcgaccgccatgcgcgagctccgggccgacgagcagcagagcacccagcgctcgtggttgaagttggagaggatgacgtactgccggacggcgggggagcgccgaggggcagaagcaggcagatagcgggacagagaggaaaggggtatgcttggagtggccggggccggtgtatgtatcaagggctgagaggagacgggcgacatagtccgggggtatggcggggcagaaggagatatcaagggcaaggcaaggggggcaaggggatagatgatgactcggctgaagatgggtatgggagcaagagagagggcaagatgattgccgccggggattgggggtcgagggtcatgagggagacggccgacgggactaagggcagaagggcagatcgggtcagctcatgcgcgagcagaggaagcagaggagggtcggacgcacgactcatccatcagcgcgccctgggaacgtctcggaggtgtcgaactcgtcgtcctcgtcgtcgccttcgtcgccagtgttggaactgtcgctcgctggcgctggcggcgctggaaccgacgggggtgccagttggctgaggcatagctcggccaaccgctgccagacgacgatcgcctgctggacgtcctcatagtccgggtgatcttcgggcgtcgcctcgagcagctgctcaagcatgtcgtcgtagccgtgcgtgacccgctcgaccggctcaaacaggacatcggtcaggtctcggccaccaaggtcgtcgccgatctcggcccagaccgactcaaagagcttggcgatgtaggcgtcgttggcgagggcgtcgttgagctgccggtcgtggaaggtccggtgagcgcagtaggtcggcgtcgtgaacaacggacagcccttgaagataccggcctgaggaggggagaggggggaaaggatcagcaagggacgacagccgaggaatgagaggccatgtcaccgctctgcgctcgggcgcacattgcagagaaagagcgtgctaatccgatcccggcccgacgcctcgacctcgcggagccgcctcgcaagccgccgtgcattgtggacgatttcggcgaggttgccaaagtcaaggtaggcttcgtccccatcgagctcgtggccgggcttgcgggtgaagcggctgagaacgagctcgaggtcagacgcgtgggcttcctcggccgcgtagatgaacttgatgacccggtcgcgctcggtcagcatcgggaagccttcggccggccggatgcggaggctgaggggcaagggagggtgcagggtgcagtcagtcaacggagtcgcctgagcttaagcacggcggcggacgcacagaggcttgatcttgaggtttcgctcgacgcggtacttcaggctgcggagagaggggaagtcattcagcgaaagcgcagcagaggccatgaaggagacaccgggacccacctcgcgtcgaccttggcgagctcgacagcggtggcgaggaccgcctacgacgatcgcttcttgagcttgagcgggctgaaacgccggccgcggtaggtcgacggcggcgtctcgcggaggcgcttccggacgcgggcatcctgctcatcgtcgccgtcgtcgtcgctgctttcatcgcggctgcgcttcgtacggcagacgggtctgaagggacgggaaggtcagcgacggatcgagaaggcggagagggaggtgagcacggagaagggagcacgcacggggtggccgaccgctgcatggctgcgtaacgcttcgtgcaagaggaggcggaaggcgaggtcgggctgcgggttgggaggcgagcatcgtcagatgcaggtcggtaaggtggaaggaagagctgacaggagagcgacacaccctgagacgagcatcggagacggcgcggctggcgcgcaggcggtcttgcagaggcggatgatcttgcgggtgcgggctgctttgaccgaagcgatgacgtcggtgacgaggaaggcctgcgagagggcgagggaaggatagagaatgtcagaggaaagagagtggatgagagaggaggaggacgagaggctcgcaacttggcgctcttccagtgggacggcaggttgagaacgagcgaggcacgcatcgtgccgttggctggttggctggctggttggtaagggctgaggtgctagatgctacttgatccggtaggtaggcgagtatgcgatggcaggcggctgaggggtcgatgttgagtgatggaacaaggaaagagagcgtccccctctctccccctcccgcacttgagcggctgccgcccaccgccgccactgccgccgccgcttgacaccgctttgaactcaggtaaccgggcggactcccgccagaacgccgtgacgtcgaccgtgacgatcagcatgggcacgaaggccgagcctggcgagcctgtaatgaaaagggctgatccgtgtcgctgggtcggacgaagttggcaggtaagcgcagtcgaccgccgcctcgatggcccattgctgaccgctgcccgaggccgagggcagtcgtccggggtgggcctggatgcagctcgccgagtgccatcacattatgcgcttacctcgtcgaggagcgccctgtgaaaggagcaaagggcgaagagggctgctcggtagggttgcttggagccaagcagatcagccgcggcaacggccgtcgtctcaagcctgacagggagacgctcgcgcggcggcggcgacggcaacagcaatgagcagccgccgaaactatccctctctctcgtcaaggctgaggtcggggtcggggtcgaggtgcctgcccgaaccgacgatcagccgcgctggcttgcttgccggtggctcgagtgccggccgggcgtgccggcgtgccatgcaggagcaaggtcgagactatgatggctgggaaagggcttgagaggatgaggttattgaaagaggcaggtggcgagcgggcgacgggcctcctcctgcagtccgtcaggcacgaagccggcggcgagaaggcggcgggaggcatgagagagagtcagctcgggctgtcgagggtcagcatgcgctcctcctccagtctgacggcagcaaggagcgccaatgagcagtagatcctcttccaatgcaagagagcgagtgatcgaggtcgacttgtgtagagggtgccttgtcgaggacggaggccgacgggcgggctggttgacttggtggcttgggccagactcctatcgttgaccgccgtcgacgatgggcctcctttcgagtctgaccttgacgaaagacgcccgacgctgaccgactcgtgcgatccagccttgtgagaccggccgaccggcggtcgcaggagctgataccaaaggacgcgggcgatgggcaaggtccgagcgagctcctcctgggcggtcgcagcgatggcctggagggcaggagaccgtcgacgagcgtcctgacgcggcagacaggacgagggcgcgaagattggcagccgtctgcgtccacctgcgagagaatggcgagggcggcgaggttggggcggccgtcgttcttgacgatgttgtaggcgggcgggcgggtcgaggaggacaggacgagggagactgtctattttgcttgaacgacggtgccgaggctggctgcctgctgaaatgaaggcgacaatgagggccgctttgcgcctctcgaaaaccgacggatgaaggcgcgatggagggaggaagtgaaggacgagagagcgagagtcaagagagccgtcgggccgtgttcgacggcaggagggctgccggctgccgaccctactcctttttctcccgctagcccggcaactctaccaggtctgcaggtacatgcagaccgtctgtacgtcgcgtctctcgtgtccactcgctcctcccgcttctcttggcttggaaggccgtcgtgctccccggcaggctgggtcgtgttgctgcgcggtagccctgctccgcctgaccgccagtcggttgccttcgacgtgtccctccagactcgcaacgctcacctctggtgctgaccctcgtgccctgattgtcgctgactggcaggctgagttctgacaggcagtcaccgcgacacactgaagccctcgcgcgattgcctttgcggatgccatgcccagcacgaagagcctttgacaggtcccggctcccggccgctccgctcgcgcctgctttccgcactgccgcctccctgctcctccaaggccggatccaagaggcaggctcaatgagggcgggaggggtcgacgcgtcgagtcttccgtgcgagccagtcaaagcgggcgagggcgagggcagtcggagaggccgtcgacacccatcctgccctgcccccctctgccctccctccccccttcctaccctcctcctcacgttccgccatgtcctccaagggtgcgtctctcacaatctgccagctcgagcgctttgctcggcatggtgctcgaccggggagcggcccgcctgcattgggctgaccttgtgctgccgctctcccccatttttcgaaacgaccgcccttgcctggccgaccgtctccagcgatccgcgagtacgatgccaagctgctgctgtcgcactggctgccgctgatcaagacgtcgacgccgacgtcgggtccgtcgacggccacgcccgtccgcgtcgcccaggtccagtggtacgtcctcgttttccccagcctgtcgttgtcggccgagtcggacgatctcctgcgcgcgcgcgcgcgcacagacgcgactgccgcctccgcggtccattgccgccggccgccccaggcacctgtctctcggctctctgcatgtccctgctgcatctgcagcgggatatgtctgtcctcgtagccacctatctgttcgacctgctcggtgcgaacaagggcagatgggggtcggaaccgtcgcactgctgagggaggggtcccgaccgcgctccccgcgccctcctcctttttttcggacgagccgaaccgaaggcctctcgactgaccatctgtgtctcttcctctcgtcgtcagggacgccgccaccaacaccctgacgccgcccatctcgcccggagccggtctccccgactgggtcttttctgagaagctcgtcgccaagcctgaccagctgatcaagcggcgcggaaaggccggcctcctctgcctcaacaagggctgggaggaggtcaaggagtggatcaccgcccgggccggcaagcccgtccaggtcgagaagacgacgggcacgctcaacacgttcatcatcgagcccttcctccctcacccgtccaacaccgagtactacgtctgcatcaactcgacccgcgacggcgacgagatcctcttcacgcacgagggcggtgtcgatgtcggagacgtcgacgccaaggcgctcaagctccgtgcgtccctgcgcttgtctttctttccgcaaagcaggccgctgactcaaccctctcgtcctctcaggtgtcgacgtcacgggcgagttcccgagccgcgagactgtgatcagctcgctcctcacgcacgtcccggccgagaagaaggacgtcctctgcgacttcctcatccggctctacgctgtctacgaggacctccactgtacgttcatccgcccctctcgccggcgctcggaccttgagctcgatagctgaccttcgtctcgctcctctgaagacgcctacctcgagatcaaccccctgatctgcctcgacggcgtcaacggcgctgccccgacgatcgagtacctcgacatggccgccaagctcgaccagacagctgacttcctctgcggccccaagtgggcgattgcccgcgacacgtcgatcgtcgccccggaggcggccggcctcgtcaaggctgaccgtggaccgcccatggtctggcctgcgccgttcggccgggatttgaccaaggaggaagcctacatccagaagctcgacgcctcgaccggtgcctcgctcaagcttaccgtcctcaaccaggagggccgcgtctggacgatggtcgccggcggtggagcctcggtcgtctactcgtgagtgtccgggcgagcttgactctcattcatgtttcgaccagaggttgacgcttggacgtctctctcttctcagtgacgccatcgccgccgccggctttgcccacgagctcgccaactacggcgagtactctggcgcgccgaccgagggccagacctacgagtacgccaagacgatcctctcgctcatcacccgcggcgacgtcaacaaggacggcaagattctcatcatcggcggcggcatcgccaactttaccaacgtcgcggccaccttcaagggcatcattcgcgcgctcaaggagtacaagggcccgctccagcagcacggtgtcaagatctttgtccggcgtggtggccccaattaccaggagggcctcaagatgatgcgcctcctcggcgagtcgctcggcgtcgaaatccaggtctacggccccgagacgcacatcaccgagattgtcccgctcgcgctcggtattgccaagaagacgtcgccgacgccgctgccgtcgtcgcttctcaacaagaaggctgccgccgccggcggtgccgacacgccgcttgcgactctcaaggagtcgtcggcccagcagatcaacccggacggctcgcgcgcggccgcccaggaccaaatcgtctcgttcgacaacgtcgccccgcactcgtcccggccgtggtacaagccctttgacgccgacacgcgctcgctcgtctttggcctccagccccgggcgatccagggcatgcttgactttgactttgcctgcggccgggcgacgccctcggtcgccgccatgatctacccgttcggcggccaccacatccagaagtgcgtctgccctctcccctgccccgcctacctttcctttcttgctgaccgtcgccgcccttcacgcctgcaggttctactggggcacaaaggagacgctcctgcccgtctacacctctgtccaggaggcgacccagaagcaccccgacgccgacgtcctcgtcaacttctcgtcctcccgctccgtctactcgtcgacgctcgacgccttcaagtatccgcagatcaaggcgatcgcgctcattgccgagggtgtccccgagcgccacgcgcgcgagctcctccacctcgccgagcagaagaaggtcctcatcatcggccccgcgacggtcggcggcatcaagcccggctgcttccggatcggaaactcgggcggcatgatggacaacatcctcgcctcgaagctctaccgggctggctcggtcggttacgtctccaagtcggggggcatgtcgaacgagctcaacaacatgctctcgatcttcaccaatggcacgtacgagggtgttgcgatcggcggtgaccgctacccgggcacgtcgttcatcgaccacctactccgctacgagaacgacccggcctgcaagatgctcgtcctcctcggcgaggtcggcggtgtcgaggagtaccgcgtcatcgaggcctacaagacgggcaagatgaccaaggtgcggcctcattcggctcgccctcctgctgcatgccgagattaactcgtcctgcgcccgcgctctccccttgcagcccatcgtcgcctgggcgatcggcacgtgcgccaagatgttcacgaccgaggtccagttcggtcacgccggctcgatggccaactctgacctcgagacggccgacgccaagaatgcggcgatgcgggccgccggcttcatcgtccccgacacgtttgaggacctgcccgaggtccttaaggcgacgtacgagcacctcgttcaggacggcacgattgtcgtccagaaggagactgagcccccgctcatcccgatggactacaagtgggctcaggagctcggcatgatccgcaagccggccgcctttatctcgtctatttcggacgagcgcggctcggagctcctctacgccggcatgaagatctcggacgtcttcaaggaggagattggcatcggcggcgtcgtctcgctcctctggttcaagcggcggatgccgacgtacgcctgcaagttcatcgagatggtccttcagctgacggccgaccacggcccggccgtctcgggcgcgatgaacaccatcatcaccgcccgcgccggcaaggacctcgtctcgtcgctcgccgccggtctcctgacgatcggcgaccggttcggcggtgcgctcgacggcgcggccgctaactttaccgccgccctcaatagcggcaagacgccccgcgagtttgtcgactcgatgcgcaagcagaacaagctcatcccgggtatcggccacaaggtcaagtcaaaggccaaccccgacctgcgcgtcgagctcctcgtctcgtacgtcaaggccaacttcccggccaccaagacgctcgactacgccctcggcgtcgaggacgtcacctcggccaagaaggacaccctcatccgtgcgtgtctctatgcgctgctgcgcgtcaacctccgattaccccccccccgtggtaggggcgggggtaaagggaaaggcaaccgccgtgaccggagccagagcaaggggaagggcaagggcaaaggccgcgccaagcaagagatggacgacgacgacattgacgacggcctgctcgatgcagacgaccaggccggtgtcgaggaggtcgtcgacgagcgcgaagtcaagctgctttacgtcacgccagagcgcatcgcccgctccaaggtgcttggatcgacactacagaaaatgcacaccgccggctccctagcgcgtatcgtcgtcgatgaggcgcactggtacgcccgctcaacgggcgatcagaagagcgctccgtgttctgactctccgacccttcgcaaccccctgtttcgtcgacttgctactcacagcgtctcgcaagcgggccacgacttccggcccgactataagaagctcgccatcctccggacactctacccaggggtgcccatcactgccgtcacggcgacatgctcgcgtaaggtccttcccgacctgctccggacgctcggcatgaaggacatcacctcaccgacccaggccaatcgggacggcaccgtcctcttcacctcgccactctaccggccgaacctgcgttacagtgtcgtcgccaagccctctaagccgtccgagcattttgccgacatggccagctttgtcaagcgtgaacaccttcaccagtctggaatcgtctacacactcagcaagaaggtgcaggctgcctgctctcttcctgagtgcgtgagctgaccgaccttctcggccgctcgcaggatgccgaagaggtagcggccggtctcaacgagcacggcctcaaggcgggcgtctaccacgccgacgtcaacgacgccgagaagcagcggctccaccggcgctggcgcgagggcagtgtcaagatcgtcgtcgcgacggtgcgtcctcttcagcttgctttgctgatgcgccatccgtcgaggcctgtgctgacgccttgtgattccgtccggtctgctagattgccttcggcctcggcgtaagctcaccccttgcatagcccacatcgacacgtatctgacgctgacctgccgcctcttctcggcctctctgtagatcgacaagggcgacgttcgatttgtgctgcacgcgagtatctccaagacccttgacggctactatcagtacgtcccgctagcttctacaaaccagcagcttgatgtctcgctcacgtgcacgctcggcttgcagggagaccggccgcgcagggcgggacggcgaggaggcctcatgcgtcctcttctatcgggccatggacgtctcgcgcatggccggcctgacgatgggcgaagccgagggccagcgcaagctcgacgacatggtcggctttgcgcaagacctccacacgtgccgcaagatgtaagtctggcgccgcggggatcttgatcgctccgtatatccgctgaccttgtgtcgactgcgacacgtctgcagtctgtttggccgctattttacgacaagcgcatcgcttccctcgcagtcttgggcgatggaggaggatccgtgcggccactgcggtgcgtattttccttcatcaggtcaccctcctgctctgcctgccgctgacgcaacactgtctgacctgcagacaactgcgcgcgaggcgaggaacatgtaaagctcctcgactgcacgctggccgcgtggaagatgtgcgtctgcagccagcccggccatgcagaggcgaatgatgctgatcttcattcgatttcgcccgcagctgccgcattgcccagcacgtcttgttgcacaacggccggacgacgctctctggcctctgtgacctcgtccgcggcctcggcggcggcgcgtttgacacggtcggcgacaagagcaagggtcagcgcaagcgtggccggctgatgaaccatcgcgagataatcgacctcgaggcggtctgcggcggcaagcttgccatgtcgcgcgaggtgcgtcgagcgagtcgactgattcagagggacgacgggtcctgacgctgcctcttgcaggagacggagcggcttatcatccacttgctgctcagcgagaacggcggctacctcgagcgctgtgcgttcgatctgaaggaagctgttgcgctcgcccgctgacgttgcgcaacccctccttctctgcagcattttcgcagacggcctactctgtcaacgtctacgtcaaggcgtcgccgcgcgcgctccgtctctcgcgccttgccgaggccgacctctccaactcggccatcagcatcgagtgcgccttcccggtcaagccgggcaagaagaaggcggccaaacggccgatcaagggcggcgcaaagggaggcgccgcgacggcgaaggcgtgcatccaggagctgaggagcgacagcgaagaagaggagaaggaggaggagaaggaaatgtacgaggatgagtcggactgcatcgtcgaggtcgacgagcgctttgaccggccggaaccgcagcgcgccgacaagggcgacgacagcggctcggatgacgcttttggccggcccaagaagcaggcgaagcgccagcaggcgacccgcccggccagaccgacgttcggcggcgtgaaggagggtgatgatgatgacgacgacgacgacgacgacgacgacgacgagtgggaggcgtttgaccaggcggcgctgtgggagagcctcgtcgtccctcgccagggcgtcaagcggatcctcagcgacggcggtgtcacaagcggcgatgcccgtcctcccgcccccggcaaggccgaggtcaaagccggcggcggcgacagcagcgacgaggacgaggtggacgacgcaccggttaaggtcagcggccggaaccgtcagcaggcccgctcgaagcgcgcgcggcaggttatttccgacgacgaggaagacgacgacgacggcggcggcgcgagtgacgaaagcctcatgatcatgtgaggagctgaaggttccgaccagcggggtacctgccctcaacgatgacgccgccctccacacgacctttctatcgacgacgatacgacgaccccctctcaaagaccgaaagtcctgagacagcagcaagaggagaagatgagtcagtgccgtcctggaagcagcagaggagagggagcggacgcactctgtaaacagctcgcagccgccgcagcttcttgcccgccctggaccgagcccgccgaccgcctccctcagaccagcgaccatcccctccggcccgcacacggcaaacagcagcccggagggtcggcttgcgcccgaggtgctgctgctgctgctgctactgttgtgcgagcggacaagggtgtcgattgtgctgtcgacgagcgagggcaggtccggccggccgtagatgactttgagctgtgggtggggcgaaatcgcaggctttgactcggcggcgggagaggggcgggtgatgtagacgtggatcgtcgttgacgatgaggagggcacgtcgaggagcgggaggaggtaagggaggaagacgtcgagcttggccgaggtcgggatcgcccaatggaggtcgacctggcgggctgtcgggcgcaccaagaggggcaagggccgtcagctcgcgagcgtcggaagtgggccgcgggcgcaaaaggggaccttacctctcgcgcccccgctcgccctcgcctccttcagcccgcccgccagccccaacgcagccgagattccactcccgcctacgacaaaacagacgccctcgaccgcctcgaatgagacgtttccgggcccgccatacggtccctcgagcagaatctggacggccggctgggagatgaggccgcggtggtggtcggaggcgagcgagagggcaagagcgtggagtgaggatgtccagccggaggcggggccggtcgacttgatgaaaagccggaggccgggggcggcgccgtcgtcggccgatgcgggcgcagagccgatcgtgaatgggtgctgggtgttgtgaggaagcgcaggaggtcagctcacaccaccccctcgaccacgtcgatcctttcttcaagccgactgactttctcaaacgctttcccgagccccatccccgtccccggcaaaaccctcacatagcccttccgctcgacgtgttgttcgagcggcgcggccaccggcacgagacgaagcaaagacgcgtcgcccgcccgccaagacacgcgacgacgcgaccgggccaggcccttcgaccgacgcgtccgattcaaggcaccatccccatccactgaacagagcgaccggcgcaggtcgaaggaggtgtcagcttgtaagcagggcggctgccatgcaggctcatcttcagcagaaggcagagatgcgggcgtgccttctcgggaaacagggtcagcaagcaagaaggagccgcataaacggcctggaacgctgcgactgcagctcttgaaactggatggaaggcagcaagagggctgggctcgcttgtccgagtaggatcaggtggcagaagagggttgcgggagagcagcaaaagcagggcctgacggcgagcagctcgaacggaacgtctttggacaaggcgggagaaatgggccgcgcagcaagcccgaggctgcctcctctcgagcgagtgtggaccatagcgacccctggcttccaacctgcgtacacacacgtccatgacgagcagagatctgccagcagtgcgttgcttcaggtttgcgatttgtcgaaggctgagctcggctcgtgagattgccgtcttgtcggcactctcgctcctccttgagcggccgcgtggtcgtcgcccctttcattctcctgaccacgactcggacatcgacggccctccttgacccctccctcatctcactcgcaggcaggctgccgtcgctcagctcttgtgatctgagccgtcatgccaaccaaagtgaccaaggtctcttggcgagccggcggcgatgcaacccggccaggaccggcgccgcctccgctgccgtcgagctcttccgacgcaccgacctcgggcggcgtcgccttcacgacgtttgtcctcgcccatccgacgcatcaggtacaaggcactcttcgtgctgaggtatacgatgatgagcagaccacgagctgacctgcctctggtcacatcgtcccatgacggcagctctcacgcaagctcgtcttcacctctccgcctccttgggcgtcgctcatcgagcaggtcctccggctcctcgcgccctcaccgttcgtcgccgagcagctcgggctctccttcttcgactcgcaacgtcggcggcatctcgtcgatggcgagccgggcctgctcgagctctacaacgccgtcgccgacgacgaggagatccggctgcgcgtcgtcgttcgcgagggcggcccgagcatgggcctcaaggagattgacgaggccctccggcagatgtttctccgcaaggacatcatcgacgtgcgtctgacgctttgatccctcttctgcttggataaaggctgacctgtcacgatcgaccctggccacgctgcaacaggagccgatcccggtgttcgcgcacgagcctttgcagcgccggccgcgcacacgcggctcgacttccagctcgtcacggttcgcctcatccggatcgcccatcacgccttttgcgagcctcacgtcgccgccccagctcgtcggctcgctcggctcgtctcccggtctttggccagcactgtcgtcggcggcgacgctcgcgcgtgacgacttcgacttccccatgccagccagcccgccagcgtccatcgcttccttcgctccaagtctgcccgactcgatcagcgaagacggtgagccttgttcaagatggaatacctgggagaagcatcagccatcatcctggacggtcgacgatgagggcgagggcgaggattggtcgcgcgccgaaagcgtcgtcaagagcattcgtcggctcatcgaggactttccggcgccacttcagccgaagcacaaggcctctcagccggctcagcctgcgaccgcggtcagtccggacgacatcgtcgacggcctccgttgcctggttgaggagcttcgggcgagcatgcagcgcatggacgcaatacgtgcgcgcacgatagacctgatcggcgacaccctctttgcgccgagttgcaccccctcaccaatccactcgccgcccaagccgctcgcgccgctcctcagcccagcgccggtgctccatcatccggtcccggagcacctcatcccgcgcccgacgtacgactcatcgtcgacagtctcggctaccgtgaacgagcagccgctgccggagttcgcgcctgcgcgcaagacgctgccgcaggtcgcctcgccggatgccggcagcacagctttcctgccgaaggggctcgacctcgatttcgagagcagcggccctagcccagttgctgatgtgccgttatcgcggagcatgccctcagcgctcatccttggaccgcagcgatcagtcgagacggagcgcagcaagatgcggacgccaacggcggctgccgcacttacaccgatcccgccagcacccgtccttcgggccccgacaccgccgccgctgtcgctcgacgagttcccgccgctcagcatggcggccacggccaacaagaaggtcagctcaagattccgcgagatcatctcgaccgagggctcgttctcgtcctcctcaaccgcccctccgacctcgaacggctcgagcgagcgcagcagcggagcgtcgtcgccgccgacgtctgcctcgcccgcgacgccggttgcgacgccctcagccaagctggcggcagtctcgctgaaggcgcccgccttcatcgcgccggccagcaatcagtctgggctttcgcaccggccgtccccctcgctcggcggcctcacacccggccagcgcaaccagctcatggcgacggcgacgccgtttgtcagtcagcagcagtacacgcaccagcaaccgttcggccagccactgcaccagcaggtgcagccatttttctcgccctcgcacaaccagtggctcttcccgcaggcgccgaacaacaacggccaggcctttgtcttcctgccgcagacgatgcagccgcacggccgtacatctgcgtttggtggtcagcagcggaacccctacctcggcaatggttacgaaggctggcccggaggcatgcccggcttcattcctaatggcttcgtccccggctacggcttctcgctggccggctaccacagcttctcgccgagtcctccgcagccctggctccaggtgcagcgcgctcacgaacagcaaaccatccactatggcggcagctggcgtccgcaccagccgatgtcgactggaacaaccgcccagtactcgacgccgacctcatcaacccctcgccttagcccgggcggccaaggcgagcagccggcgacgcagccaccgacgtcgcagcgcacctttccagcctttccgaccaagacgtcatcccagacgacggccggcacctcggctccggtcccgacgcttgcttccgcatcggagccgtcgtcgacgccggcttcgtcgctctttcagctgccgccgcctcctctgcccggagcgacgtcgccgccgccgatgccggcgcacttgctcccggcctacctgcgtctgtacgcaaacgccttcccggccgacgctgccgttcggatccagctcgccgatcagcagctggctgccatgctcaaggccggccgcgacacggcccagatcatccccagcgacaacaaggccggctggatcgacacgctcagtgacccggccaagggtggtgccgtcgccggtgcgccttgagcgtcgacgctctcaacaccaatcgacttttgcgagagcatcgtacgtccgatgcctgaagcggccttcgtcaccctctggctctcgcgtctgcttggctaacccagcccccgcttctttcccggtctaccgtcgggtcgcgcacatttcgacagcaaagcccgcagcccacccctactcatgccttcctctatccccggcggtttcagcatcgcctttcttgctgcccctttccgaatcgcgctagcgaggccggccgcaaccccattctctgcacctccaccgggctgtcgtcacccaactgcccctttccgcccttcgcttccccgggccgcccccaaacctcgcgctagcatgcaaacatgcccgcccgcccatccccggcaaccaacacgataccactgggccaaaagaccacaatgacgcttctgacagaagcgccagttccggacctatatacccttgaagtcgtgactcatagactcgctgaacctagaaccatgacacttgcccggctcctcgaatccagggggctgacgcatatagacctcctcctgcagctcgccgtacaagtaggccgtctcgacgtccatctggtggacctcccagtcgcgggaggccgcctcggcgagcagcagccgaagcattgtgagtttgaccactggcgagaacgtctcgtccgcgaagtagtctttgccttcgacctgactgaagccctgcgcgacgaaccgcaccttatagcgaaccgtcactccttgtgcgtccttcttctccgcgagcacgtctcggcagccgacaatgttgacgccctgcggcctgggtaccagtgtccagaccttgtgcttgtgtagcgacgcaatctcgagctcggctcctaccctccaggcggggccgttcgggccggtcagcgcctcggtcagtcgctctggtacacccgcctggtgagctgctgcgagggccatgacgaaagctgctacgcatgggccgtcgaagctgaccggctgtgcgtgttcggtcccggcgaaaagggcctgcaggatggccgttgacggttccccgccgacacccaccccaccctccgaccgcctgtcgacgaccttcaacctctctcctcctttgtcgactgcgtcgtcgaccgcgagaaggcctgcctggtccgtccgatagcgtgcggacctctgccgtgaccgtgctgggttgcgccgtgcgacgacgccctgacctctctggccttcgaccgggatcccacttgcagtgccagtgccttccaaccggccctgagcatcgctcgacggccgttcgtctgcgactatctcatcccctcggagaggacctcgccggaaacctccggagggtcaactcggttgtttgcgggaggggttggtgatctccggaatccaaaatcgtctccctcgccgcctccgaactcgtcggccggaaggaggcatctgcttggaggggcatcgggcaggagcagaggccggtcgcggtcgcgaccggcgccctcgacctcgacctcttcgaccgacccgaccgacgatgaaggccctggtacgtccccggccggcgccagcacaggctccggtccctcttgcacaaccacaggagctgactcgtctcctcctggctcggcagctccatccggggtgtcctgaccgttctgctcgtcggccccatctccttgtgcgcctaccttcgggacgccgtcgtaatgcccgcacgggctctcgtcgtctgatgcgtcatcctcctcgtcccgctcgccctccggtgcctggctgacgtcgagcttgttggcatccttgttcaggtcgtcccaggttagggcgtcgccgccctttctgtcgaccgctgaccagaaccggccctcatcgaacgcgaccgtggccgaccgcacgaccctgccttgggaaggcacccacacgcaccaggacgagaccgcgccgccctcatctccaccgtagccgacgaagatgccgcggatagccttcggcgagagggaactcggccggtcagccgccggtacgtggacccaggcgaggcaaccccaaacccgcagggagctgacgctcgccttctgccctgtccaggcctccagaggaacgcgaccgttgatgaccgagcggtttcgagcataaacgaacgaccgagcggccctgccccagaacgatcgaccgagcccagccaggagaagctccgtccgcatgccttccttgatcgtccgtacggcgcgctcggcacgaccattttgctcgggcgtatgcgtcgaggtgagggcccgctcgatgcctttgccggccagtacaagtcgaacgctgcgctgacaaactcgccaccgttgtccgaacacaggacccggacacgatgaccttccacatccgtctcggccacaaaacgctcgaagcacgccagagcctcactcttcttcttgaggaggtaaagcttgatcagggaagaggcttcgtcaggaatgacaaggccatatcgatggccgcttgccgtcgccggcaaggggccaaagaggtccgctgagaccacatcgcctggtcggctcgccccccgagcgaccgacgcaaccgtgaagctgcgtcgcgtcatcttgccctcgacgcaggcgtcgcatgctgacatctccttcggcgtcagctcgaagccgtcaacctgggccgccgtctgacggactcgaccggtaccgaggtggccgagccaccggtacgccggtgcgcaagctcctcgtcgatggctgacgcgctgacagcaacgcctgacacgaccgcacctgggcggacgtcccaggcgtacatggacgatcgtgcgggcaccacggcgacgatgtgcccagcccgctcgacgacgcacccgcgtgcgtcgaaggcgcagcgcacgcccgaggccacaagatgagcaaccgagagaaggttgcctgccaggctggggacgtgcaagcagtcttttaaaacgaccaggtgcgatccggcctgcatctcgaccgtgccgctgccgactgactcaatgtaccgaccgtctcccagaaagatcttgcgcttgtcctgcttgtacgatgcggcgtcgaaccagctggccctgccaaacattgaccgcgagcagccagagtcgatgtacgtcgttccttcggcgactaccgccatgccgacctcgcttgtagcgcgcagggccgcctctacccccaacgagcttgcagcagaactgacgacgtgatactcggaattggatgaatccacatcgccagctacaatcgccgcgctcgcccgcccctctccacgaagcttcctgccgagccggcgctcggactcggtaagcatccttcgtctcgtgtccgacgggatggtggtggaggtggggttccgacaattgaccttgaagtggccaaactgcatgcagttaaagcaccgaccgaaaccggtgattgacgtccctcctcgttgaccggacgtgcgctgatgctgctgctgtctgaggtggacgagcaggagcaccgggtggtccgcgtgggcggccatcagagtaatgttgcgggagagcgtgagctgggtcttgccgacggccttttggacgttgagctgccactcttgccagcccttggggtccttctcgacgttgggcttggggatgaggtagggcgagggcgaggagggcagcggggcggggaggcagtagagccaaaggcccccgctctgcatgtaagcattgtgcgtaacgaccaccgccggtagtcctcagctcctttgagctcgtgtacccgctttgatatggcggggattgtgtcggtgggatggaggtgggtagggagagtcgtgtcggggcgagctcgacgagctggcgaaagatcgggcggacgggaccacttcttggtgacgtgcgcgtgatgtgtcgtgtcgtgtagcgtgtggggtagcgtatcggtaggttcgggatgaaaactatgggctcataacctgttgagcgaaggacgaaacggaataagctacctcagtcaccaagaagtggactatatatgagataatctaggtacctgttgagcgtagacgaaatggaatgagctacctagagtgagggtcaggacgtgttacaagcggtgagcaaaaaggcgaaaggtgggactgacctcagtcaccaaaaagtggactaaggtctctacggaaggggggaaaggaaaaaactaagggggagagagaaaagaggaggaatgccgatgcagtccgctcgtcaggagtgcatcggcaggcgcgcggccgcgagcgcgcgcgcagccgcctgctgccgccgctggctctgcgcgccgcgccgcactcgtcgcaactcaacattcttaacctgctgagcggcgacctcgagatcgagtacgcgcttctccgcggcgccaagctgcaatttgaccgggctgaaaatcgttcgttcgtactgcggcagcatgagcgcacccggaccaaacgtgtttattccgacgctaggaacatcaggaggggatgaagagagagagacgagaggtcggacctagaggtgacgccgcccgcgacaatcgtcttgaacgacaggtcgtgtgtctgcgagcaggggggcgggggggaggaggggtcagatcagcccgtctgttggcgaacaaccagtctaccgaccggccgagctgattcgacgcccaagcggtcagatagccgtccgacagcgcacatccgccacctgcatcacccgctctggcccgccaggggaagcgagctcttgagaaagtggggtggagggggaaggtactgacgctaattccatcgacccccctcaggcccggcccgacctcgcccctcaaagaattcacatccccctcggtcccttccagcccgggaaggctccctatcccggcgtgcgagtgcatgtcgaccaagcctggtgtgcaccattttaaatgggcattgagggtgatgaacggtgtgggaagggaggcgatgagcgaggggggcgcgagcgggccgacgtagctttcgcggccgggcagcaagggtagggaggagcggttcagcgaagtgagtcgcaactgttaaccccacaagcgagcgagcccgagcgagcgaaaggagagtcgcaccggatgaccccttgatccagcacgacctcccccccctggatcacctcctcgccttcctccccgcccgtccaaaccgtcgcgttccggacccagaccgcccccgtcccttgctcgaagcggtctgagcgcgtacggtttgtgaagtctgggggtggggggaggggatcgtgtgaggggcaggaggtgaggagggcttggaggacgtgcggcagcggatgggctggcgaggagcgaggcgtcgagccgacgagaagaaggagcgatgaggctatgaagagcgcgaagagggcgatggtcgagaggagagagcctgcgaggacgccgacgagcaggcggcctcctcgctctcgtccgagtctttgtcgtccgaggccgtcgtcgtcgtcgtcgtcggagaggggcgagacgacaacgtcgactgacgacgacggcggcttcgcgtcggacggcagcagcagcggaacgtatgccggcggcggcgccgagggagtaagacgcgtcctcttcctcagtggaagtccaagcatgtctcgttttcttgctttctgcgtcaggaaaggaagcgggatgggtgcgatggtcggtccttcggtcgatagcaagtcgcgcgagcaaggaaggcaagacgggcgaagacggcggcggcgatcgccgacgggacgggcgattgcgcagcgcgcgagcgagcgagcgagggcgggatcaacagctcgggaggggaccctcgtgggactctcgctcaatcgtcggcataagcgaggttccgaccggcagcagcagcggagcaggttggcggagaaattgagtaaagcatcaagatacaaatagaatgctcgcaggaggtgggaagggagggtgggctaactacaaggcgatgcgaggcgggggacgagagcgagatgggagggaaagaggagagggcgaggaggaagacatgcgtaagaaccctctcccctcctagccttgcgcgaggcgaggggacggactgtcgacgagcgggtggatcgacggagtggggcgcacagacgcgagagcgagtggacgagcgacttgggtgggccggcaagtaaatgccttgacggacggaccaagacggcgggccgctcgattcctcgttccaaggcttctcagcccgagcgccgctctctttagtcatccttgttgagcgaggccttgagcgactggagctggtgagcgcaaaggaaatgaaaggaagggtcagtcggcgtgttgagtggaagggcgttgggtgcatggcgaatcgatgtcatccgctcgctccttccctgtcagcgagcgagcgagcctgcattgctcgcctcatccctgccacagacgcccaatactccctcccagcaaagccagaaagacacttccgggggggggggacgcacctcctcgcgcgactttggctgctcgagcccagccgcaacgtctgccttcgggacgtagggctcgcgcgcgccgccatgcgagcctgggttggcgtcttgaagggctgggtccgtcttggggtcgttggtcgtctaggtacgtgcgggcagcacaggggtgtgtgtcagcgacgggcgtgcgagcgggtaggttgaggttcggtggtggagagggtgacggacggcagggtggggcaggatctggcggcgcagtggaggaggacggctcgtcagtctgtctctcaccattggtcgtgcatacagtcgatggtgtgactgactgagaactgctcttcctttggctggtgggtgttggtagactgcgacatgctggcgagttgagggggcgacgtataggcgggcatcgacgcttgagcgagagagcgagatggggcgcggagggtgagagtgacgctatgagcccgcctggatgcattgacccgtctggatgcatcgacgggggtgcgcgcgtcagcctgcttgcttccctcctctcccttcgaccagcgaccctcaacaagatggccaccgacgaccttcgccaacgcacgccagcagcagcaaacggccacactcccgcactcggtcaagcacgacaagtcaaatgcccaccagcggcagcgaccgcggcgcgcaacaaggcggccctactcgccggtgcaaaggccggctggtgggcgcgctacgaggtcccgcgcaaggcgctccattcgagcataggtccgttccgctcgtttgccctgtgctctacgagatgatgcgaggggggaaggggggagggataacttggagaaggagagagggccggcaggggccttcgtccctcggcgctagacgtctgacgcgcgcgcgcgcgtgcgcgcccttgggcgatgggcagacgagctgaactgggttttggagactgggctggagcaagggaggcgagggggcgagacgcgctggcacagggggtgatgggagcgttcctgctcgttttgcgcgcaaggggaggagggatggcggaggtacggacggctccccgccgccgcaggcccctttgacatgcgcctttgcggcccccctccgtctgagcgcaccctttgatccgtccgcccttgtccccttccctcctcatactgaacccaaccttttctccactcgcaggcctcctcacgctctacctcaaccaccttaacccgccctcgctccgcccgcttctcctcttcctcacgctcgcccttctcgtcgtccttttcttcgacctcatccgcctctcctccccttcctttgcacgggtctacgagcgccacctcgggcccttgatgcgggccgaggagcggaccaagccaaacggtgtcatctggtacctcctcggcgtgctgttcgtgctggcctgctacccgagggacgtcgccgtcctctcgatcctcatcctttcctgggccgacacggcagcatcgaccctcggccggctctcgtcgcaacatacaaacctcaacctcgccctgcccaggcggtttctcggcctgccgatcgcacggtcaaagtcggtcgtcggcttcctcgcggcttgggcgacaggcacggccgttgccgtcggctactatggcggcgggccgggcggaggcgagagtcgaggggggagggtcgactggcgggtgctcgaatggaggaggggcgtcgcgctgacggggacgatggtcggcttcgtcgcggctgtgaccgaggcgcttggtcagtttccctctcccttccccccctccttctcgcgctgccctccgaaaacgaccctccgaccctttccctttgccgtccatccaaactgacctccttccctcccctcgctccccggcagacgtcggcgacgccctcgacgacaacctcacactcccaatcgtctctggcgcgcttgtctgggcttggcttgcgaccagctcgtacttcctctagcgggcgcggggccggcagaaacagcaatgacaaaaaaacggggagggggcgatttcgtccggtcgcccgcgtttggtcgaacggagagagggcttagccgcctccgtggcagccgccccggccatccccaacttcttcagcaagcccgcgacgtctgcccctccagcaccgccagccccagcggcgccagcgagcaacccgttcgccaacgtcggctttgcaaagcccgcaccggccgcggcggctgccacggaggcggctaagccggcgtcgaatccgtttgctgggatcagcgtgaaggaggatgcttcgaaggtcaggccccttcaccgcccacgcccgaggcgaaaactcgacgactgaccctctctgttgttgacagcccgccgctcctgccgctgctagcggtttctcgttcggcagcgcgcctaagcccgcttcggaagctgccgccccgcccccagccgcttcgcccttctcctttggcgcctcgtcaacgcctgccgcgacgcctgccgcaccgccctcaagcaacccgtttgcgtttggcgcgacgacgacagcggccccggctccggccaagaaagatgatccggcgccagcctctgccgcgccctccttctcgttcggcgccgcacccaagcccgcggccgcgcctgtcaccgccacgccggcagccaacccattcgccggcgtcggagcgagcgcgacgcctgctccgctgttcggcgcgggatcttcctcatcgatgcctgcggcggctccgaagccggctttcagctttggcgcgccgtcgcctgccccctctgctgctgctgaggccagtgcgcccaagccgtttggcgcgctctcgagcggcggcatggacgccggtgggggagggatggagtcgtcgcctgagcggccggccgcgcctgcgaccggcggtcccggaccgacgccgctctcgtttacctttggtgcctcggctccggcctcggcgacgacgacggcggccgagcagcccaagccggcctcgtcgtcgccgtttacgtttggcgcttcggccgccccaacgcctgcggcgcccaaggcctcgttctcgtttggcgcgccggcacaggccgctgccccgtccaaccccttcggcagcggcgcgtcctcctcagccgctgcggctcccccagccaaccctttcggctcggcgccctcggcgacatcgacgcctgccttttccttcggcgcttctgccccttcagccccggcacctgccttcggctcgggcgtctcaacgccagcctttggctcggcctccccgagccctgctttcggtcagagcacggctgcgcccgcttcctctcccttcggctcaaacacggcatcaccctttggcgcgcctgcgcccgcaccaacggctgcgccgtccttctcgttcggctctggcgccgcgagccctgcgatcaaccagggcggcggcggcttcacgtttggcgcgacggcgacgccgccgacgtcggccggcggagcgggagccggctttggcggcgcagcgcctccttcgtttggcggctcggccccgagctcgacgacgccggccttctcgttcggcggctcgagctcgaccgccaacccgcctgcgtttggcggcagctcgactccgttcggcagcggtgcgcccgctttcggtgcgcctactggcgacggcgccggcggtttcagtgggacaacgacgcctacgacgggctcattccagtttggcgcgacagcgggtacagctacgccgcctcggttcggcagccctgggccaaccggcgcgcctgctgctgctagcggcgctccggcgctcttcagcatgggcgcggcagactcaaactcgtctcctgcccggtgcgtccctccctgcatagtctcgtcgcctgccgcgtactgacacgcgcccttcgctcctccagcctcggtcccaacggccggcctatccgcccgctcgcatcccgccgcgccggtagcaagaagctctagacggctggcagcccatctccattccctctcaatcaatctgcttcctcgattctttctccaaattctcaaacgctcgcatcacacgagcttctcgcctccaccgctcgactcgatggtcgcgtgcgcacgcgaacactggcggccgacgtcgcatcgtcgactgggccgaccgaaccagacggctcccagcggcctcgcccgttgcgccgtctcaactgtatggccggcctctcgccggttgctctctaagtacgcagcaagcatcccaacctcacggcctttctctcttcccttcgtaatccaaacctcctcctgtctggtccttctcatcgctttgccgctgctcgctcgctgctgtttcttttggccccccttatcgctgcgtattgtagcgcgggcccagtccctctaggatgtctgctcgatggcctcgtttctgatcgaccgaccgacagcgagcaagcgagtattggtaagtcagcgcaggagagatcgggggacaggcgtctactgctgctagcgacagagtccggcggatcctcgactggcgcctgcccgcctcgctctccgacggcgccgacgacgacgagggctcgcacgactgacgatcgaagctctgacgcagcaccatcaccagcaacccggcctcgtaaaacgtacgtcgcgaccgtcgccagccagcagctcagccagcaaagaactccgcaggctgacactcgcccctcttctctttctgatcgctctctcgccttctcgggtcgctctcgtcatctcgccattgctcgccgccacgccccgtcatcagctcgccactcacttctccttctccagctcctctcctcttctcacatctacactcacgcaccatgtctgactgggacaccccgaacgttgtgtgcgtcgttgcccgctcgcactcttcctaggacgagctcgcagctgacatctgcctcacgctccatttcgttccttcgccttccacgactcttccgtgctctggatctgcgctacgtctggctcttaaatctggcagcatcggctctaaggcccgccgcccaacggccgtcaagactgagggcgcgctcaacgctgcccgccgctcgggcggaccgatcgagacgacagccaagggcgtcagcaacaaggtctcgcggggtatgtcccgcttcagctcgccggagactcttcggctttgcgaccctaggaagttgtgcgctgagctgaccttcgccttcgacgacacatcgctgcctggcaggcccggaccaccagaagatcgctgctctcgaccgtgacgacgaggccaagccgccgcctaccgtctcgccgtcgtgcgtcccccccttggctccccttttgctagggtctcttcgcgagctgacctctctctgtctcttgcgacctgcagcgtcggcgccgccatgtccaaggcccgcatggcaaccaaggacgccgagggcaagtcgatgacgcagaaggacctcgcgacaaaggtcaacgagaagccgtcggtcatccaggactacgagaatggaaaggcaatcccgtcgccggcgctgctcgccaagctcgagcgcgtgctcggtgtcaagctccggggcgacccgaagctgattggcacgccgctcgccaagcctgggtccaagaaataaaagaaagaggacgcgcttgtctgttctccaacccctagtgtatccctagaggagtcatgcctcccacccctgtgacgctctgctagtcatgagctgccgaacctgaccgagctggcggctgcgtgtcggaccgaccgtgtgtgtgtgtgtgtgtgtgtgtgtgtgtgagagagagagacgatatgcaagctgcttgagtccagacgggaggttggaagacgttgcacctccaactgagtgtcgaggagggatcgagcgacggtcggaaggaccgtgcagcgctgcagggctgcgcttcgtctcacccccgctcgtcagcagcgttcgctcgtcctctgccagtcgcttcttgcagcagcagccatatacaatacctcattgcggacgacctctcgacgagagcgagccgggcgaaagtggcgatgctttgacggacgacgacgaggtcgagcgactgccgacgccggcgaagaggcggccgccgcgtttcgccctgccgcctcctttcgcccgaccaacacgagggaagaggaagagatggtgggaggtcggggcgcagcgggccgtgtgcgacgaagggaggcgagagcgcaagagccgaggttaggaccagtcgttcgtccgtccacgccatcggcggagtgttgcggaggttcaaaagagtagacccggcgcagcgcagccgcgagcgcagaggatcgtcaggcaagaagcgaaccgagtgtcgagtatgcgacgagagaccggttgaggaaggacaggaggaggaggaggaggaggttcgaacggaggcgagcgagcgaggggcgagatggcgagtgcaaaggcaaggatggatgggttaaggggttgttgtcgtgctggtcagccttacgtgtactttgtcttgggcggccaatcaagagttcgtcgtccagagcttggacaacaccagtgagcgaggtgggcgaaggggacggaccgggcacctggacgactcaatcgaacgccaacgtcagtcgtgcgagcttgccttctcaacgctagcgagcagcgagggagacgtacgagcaaccgcttaaactttggcgggaggtcggccgcccggttgggtatgtgaaggtcgccaatgaggaggacgagcattgcgtgttgacaggagaaggtggtgggtcgaggaggacgagcaagaagggctgactgcgggcttcttagggtggcacgccccgctgactgccggcagctcctgacctcttctaccctgcttggtttggtgctcagacttggctgaatagacgcccgatagcgcaggcttcctcctccgcctcgatttatgcaattcgggtactcgtcttggcgagcttgggccggtacgacgacggggccctcccttcgtggcctgcgcgcccgacccgaccatctctccgcccgacgtccaaccaccaccaccaccctcatgtcgtccgcgccctctcctacccctcctcttccaacagcagcagcagcagcagcagcagcgtccttcgtcccgcctccactggagggcgcaaggagcgggtctgcgccggaaggaagcgacgcgcggcgggcgttggaggacgtccggcggcgaggggagggcggcaagggtccgttctgtctgcctctcgctctcctctcctcctccctatctctgtctgaccgtgctgctgctgctgctgctgatactgatgctggtcgcctgcttcgcagtcatcatcctctttaaagcgatcggctcggctccgctcatgcgccagaaccagttcaaagtgaccggcctctatccgtttcaggtccgcctctctctctggctgcagcaggggccaggactgacggaagggctgacaccggcgtttggggggcgttttgaagtttgtcgtcaatcatttgaggaagacgttagggacaaaggcgacggagccgctcgtctgtccctctctctctttcatcctcgcctctcccgcttaccctgagctgacgatctcgcactctcgctcgctccctctcctgctccttccctgcctgccctccctcactcgcacacccactcactcgaaccgcccgctcgctcgttcgctcgtccgcctctccgctcgaccctcctccctcgcccgttcgtcacctcctctctcgtcgacccgctgaccgaccagttcctctatatcaacaactcgttctcgcccgcgccggacgacacgatcgtcaacctgttcaaggtctgtccgtccgtctctctccttcctgtttctcctcccgttcctccccccctgtgtcgccggcccttaagtggggttttgcaaaggcgcatggtagaagctactgctgctgtcacctgttactgcgcttaccctgcgacggggaaggaagagctagcagttgcagatatcgcgtccgcagatatcgcatccgcagagatcgccgtcgccgtcgccgtcgccgtcgctggtcaccgcaaacagccataaaggcttcttgcttgctcggcgcggtcaggattagcgggcgggcgggcagtcgggtggttaaacgggcaggtaggagtcgggtcggattagacgtcaggattgggatcggagaccggacggccgagtgttgagctcggggaggttgagggcaaggtggcgccgtcgtcggaagactcgtccgttgtcgtccgagctctgatgtgggcaacgggcgaggataaacggacttgacggaggtcgaaccgttgatggtcgacgactaggcgtcgcggggctcgcgagcgagcgagccagctcgctgtcttgccgctttcgatttcgattcagctcgacttcactcgacttggggacctgatggcggtggcggcggcggcggagcacgtcgtgcctgtccgggcgtcgcgtcgcgtccgcgttcgtgtcgacctcgcctcgctccttccgtcgcccacgctgcctcctcccggtccgacatcgatccgcccaagcaagcacagttcactaacgctccctcccccccctcctctccctcccacacccgcctcggcgccgcagtgcttcaaatcgggcaatcagctgatcgtcaactacaggtccgtttcgtccattccgcccgagcggaggacttcgtctgcgcttcggttagcaagagggaggaacgctgattcgagaaactcgacttgtgacttgcctctccgcccttgctcttcctccttcatcttgctcgtccgattacggtccctttacccctccttcacagcacgacgcaagcttggggctagcataacgcatccgcccgaccgaccgaccgaccgaccgtcgttgtcgtcgactgcaacgccctccttctccaaaccgcctaagccggccgagtgacccgacgccaggaagcccggtccgatccgacccggcctacttgcctctgtccttacctcattcctccctctgcctgccgccagccccgctgctctcgagatccaacacgccgcactgcttctcttctttcctttacgaccccacccaccgtgtccgaccgcccgatgaggatgacgtctcttcttcttctttgccaacgacgacgacaaacgtacggaacgagacaggaagagagatacccctctccgccgttcgcccatccgccccccctcgctcccctcaacccgcccgcccgaggagacttcccgttagtctctccgcattcgtccgtcgtctcacgagttgcccatccgactccaacgatgacgacgatgacgatgacaggccttgctttcggtgcgcttgagtcgagggaaggggggtataacaagcgagggcgatgctcgcgcgtagccggaacagaggaagagaggggtagagcagagccgtccggcgtgagcatgggaggaaggaggaaaggggttttttggtttcagttgaggaggagggggttatgcgccgccgctggaggatggagtgagggagggagcagggctttgtcagctgggtgtgtcgagaggatgggatgacactgcctcgctggagagcgggcgcgctcggtagacgtacacgaggatgttgttactttaagttggggacagacgagaggagcgtggaagaggagaaggaggaaggagagggtaaggaaaagggagagagacgtcagttctcagaccgaatggagggctgctctcgttcgagaaacaagcgtcaaaagccagtccaaatcccgtccaatctccgcccgtgccggtcgagctgtcaacaggccttgcccggccgtagccgcccgtcgcctggcagaccggacgcgaggccgaactggaggacggctgagcagcagcagctgaggcgacgacgacgacgacggcggcgacgatgacggcgaggggcgagcgggcggcaggagcgacgcaggcgaccgcagcgactggaacggcttcaaccaccgtctgtgcacacagcgaaatcgcgagcgagtcggccgactccgacaggagccgaaagcacgagaaaagcaaaacaaacgcacatagggatgtggatgagcttgacaaagtagccgatgaagcccatgagcgcaaagccgacggcgacagcacggcagatctggaagaactctgaggggccgcggaaagggggggggaagggggcgcctcccccacctccaccgtcacgccggacgaggacgcggaccggctcacggacgttgattgcgtttgagaagttgaggacgtcctgcgggaccgtgtttgaaaagaggcacgtctggcgctcgacgccgttggccagctcgccgcccgccgctaccggaggcgcggcgccgatcggcccgacgacggcgtggttggcctgctgctgtgggaagcggccgcggcccgagttggggaacgggttgttggacgacgggttgaagggcgattgagcaccgttgtcgtacggcgaggccgcgacggcgggggacatgaggctgcctacgccgccgccgccgccagaccggttgcgcggcagcgggaagcgcttgacgacctcgacctgtggggtcgtaagcgagagcgctcgtcagttatctgagggttttgctaccgtgttggacgtgggcgcaggactcacgacgtgctcgtagaggtttcgcgcgatcagctggtcgacctcgtcaatgacgaggtacctcacctgctcgccgctgagcccaccccggccctccgcaaagagctcgccgaccttggccggcgtaccgacgatgatggtcggcgcgagccgccgctgctcgtcgatccaggttgggttggccgcgttgacggggccggtgcagagcgaggagcggacagagagcggcgtcgcgaggtcgcgaacgctgagcgagaaaaaacaaagagcagaagcaagggccaaaagaagggcggtcagcacagctcgtggttcaagagcccgactctcgactcacactttgtacgcctgcgtcgcctggtcgaccgtcgtcgtaatgatgacgacctgcgggccctggtacggccccgcgagcggatgcaagaggcacgcattgatgccgggtacgacataggcgatgatgcgctcctgggtcggcggcgcctgggcgataatgtcgctccccttgaggaggaacggcagcgcccgttgctggatcttgtttggcgggccgatgccgtacttgaggatcgcgcgcaggagctcgggcgcgagcccgacctgatcccactttgtcatgttgtgtgcagtgcctgggccttgggtgctgccgccgggcgtcagcgggccggaaggcggtgcaggccagcccccaccaccgccgttgctgttggtgtcgcccgagacgtcgaacgagtcgagccggttgaaggcgccgttcggccggcgaggggctgcgccgccaggcgagggtagcgggtccgacgacgacgcgccgccgttgaacggtgaggtgaacgcccggctgccgagcgacggccggagcgcactaccggcactgcctaccgcgggaccgggcccgccgccagcgccgttgagccgcttcgggccgtcgggctgcgaagcgaaggggggcaagccgttcgagccgaatgcgctgggcgagcgcagcggctggggcgaaagcggcccttgctggccgccggcgccggcgcccttggggttcgggagcgtcaggttgaacgtcgatccgagcggggccgtgttgaacgccgagttcgagggcgggacgtagccccctcctcctccaccgcctccaggcgtgcccgggccggcaggagcgaggttcggcgtcggcagctggggctggagcggggcttggccgcgcgacgtcgcttgctgggtcgcgagcaggctctggagctggctgacagaggacgagagggcgacgacctggttcgagagcgccttgacggcgtcagactgactgcctccgccgccgttgccgccgtcgacggctacgcttgggcggtcaaagccgccgccggggacgagcgaagacagcgagaggttgatggtcgacagctgcgaagcgagggccgagacggtcgactcggtctggaggaggcgcgagatgatgctctatcgcagacgaagatggatgacagggcgtcagcgtccggtcgttcgcgggcccttctcacacgcaggcccgtcggagagacgtacgttgacgagcgggctcttcttgagcagcttgtcgagctcgtcgtcctcgccggcgccggcgacaccgtggttcattgccggctgctggaactgctgctgctgctgttgctgctgggcgataaacggctgaggcggcagctgctgaaccggcgtcccggacccaaacggcccgccgagctcatcaccgacgccggcgccccagccgccaagcggcgtccggacctggctcgagacgacgctactccccggcggagcccagacgctctgctcggccgaggagaggaaggaccctccgggcgtgcggacggcgcttgcgccagggactttgacgccgggcgagggcccgagcatcgggttgctgcttgcgccgttgctgctgctgctgctgatcccaccggcggcgagggaggggtgtgcggactgcatggagcggaacgatggcgagggcggcgagcggtcggccgccgacgagccgtttgaagcggacgacgggtgggccgacgagggagggttgttagaggccgaggcgctcaggtacgagctcgagccgtttgacgaggtcgacgaggccgagagcgagacgcggtgcgacgagtgctgctgctggtgctgctgggggacgaagggtgactgggtccggcctgtcggcccctgctgctgctggttcaagaacgacggcgacgccagccccgacgggaccatctgtgtctgtgacggcgggccgggcgtcggcgtcgaggcgtttgacgagccgggcgaggggaagatgccggtccgcagcggcgagggcggcgggagctgggtgggaggcatgcggaagcgagggaaggggcggccggtcctatgtaggccggggatggaggggaagcgtgcgctggtaaagggcggcaggcgaggagatggaggcttgaggagacggagggcggggctgaggagaaggaggcgagcgcacagagtcggcggccgtcgtcagtagacaggacggaggagggaggcaggctagcggtcaggtcggtcgcgtccaaggcttgctcgctcgctcggttggcaggcgtctctcacctcgctggacggggacggtgctgggggtcggacggaagctagcagacgggtgtgatggctcggcgggtcagcctcctcgtcgctcgagatcgaaagagggccgcttcaaacgaaagcaagggcagaatgacgcgcgcgtgcatgctgctgacaggaaggcgggccggagacgtgccccccctcgccacgaagctcagagcagacgtcgtggatgtcatcttaggaagcatcttgcatctctctccctcgctcgaagctctgctgtagaccgacacgagaagcgagagagagctcagcatgctcgaccaggcagcggccgacgcagcctaagccttgggacaaacccccgagttgagcacacgaccccagacggggctcgctgcctctcgaacgccgaccgtctcatcctccctccgtccctccctcagacgatcacctccctcgtcccacccgcgtcatgccctcccgctcgccctcgcccgaccccgagctccaacttgacccctcgaccctctcgatcctcaccgccttccttcgagaaaaggccgacgaggaagagcagttccggaagctcgccgaggagcgcgcgcgggtcgctgagcagcagcagcaggagcagggcgagcgcgagggaggtgaaggcgacgtgtcgcgcgtcgtcgctgagcagcagaagatgatgagcgtcgacgagtttcgcgtacgtcctcttggacggcggcggcgggcggcggtttgacggaccggccggccgtcggtcgctccttcctcctcctaaaggggcgggcggcggggcgcagccgacccctcccttccgtccgtccgtttattcaactgacacctcgaccccgtcttgtcgcgcctgtctgcagaaggtttttggcgagaactttggcatgtcgcaattctggtttcgtccttccttctcctccctcgctcgcaagcgcgtcgactgacacctcccctccggcccccctcccccgcggtcggtcgagcaggtaccgtttaccctaccgtccctacccccccccccccccccccctccgctgccctaagtactgtgatcttcaaaatccggcgctgccgtcatctcaactttggcggcccgacaagtcgtcctggcggtagcgcccctttcggagcactcagagttccgtcatagactactgagagagcttcagaggcttctcctgctcttcgctactatcagaggcggtgttgaccctggccgatctgcgccacggcgagagactggagccaccatttgagccattgtgggacgaaagcgtaactgaaactgccgtccgatgccgttcggcctggccgacggacgggaagcctgatctgccaagtgagacgagagacggcggcctgagttttgaccagtatgtctgggctgaggctgttaacattgccgtcgaggttctcccagccgtcgccgtccggttgagggagccaatgacgacagcaaggacccaggccgggaatctagaacccaagcagctcgttgaggagggccggtagccgtcgaagcgtgtcgagggagatgaggacgtcggtagccgtagtctggacgagatttcggaacggcgcgcggctgacgacaatgggcgcattccaaagctaagttacctatgtacagtgacccctgagtaagcattacctagctattcatctcggcgtgagcgtacagtacatgcaaagtccttgctttgctttgggcttgtgcgagagggctcagtggggtcaaattgtaagacttccgggagagggatagtagagaaatgtagagcacgcactgtacagccgccccgcgcttatcgcgacgccaaatgttctcatccgcctggcagcctcgacggcgcgtcgaaactctgggcggtcgctggtctggtattcgccatcgagctttcaaaaacgacatacgctttgctcaacgactttgtttgatgatgttggtagaccagatgtggcccatgtcggttcggccgaaggaagcctgttccagaccgaagggaagacagggccgattcaggtgccggactaccgtggaatcaatgcttacctaagccacggacgacctcgtctatgacgctgagaccattcggaggaggggactggtaggtatactgtagtataccaatacacatactggtatggtaccattatgtcataccaagaccgatactggtagggtaccagtatgcctaccagtagcctaccggtaggcatactggtctcataccaatatggcctgcccagactttgacagcctcccttgagcgcagaatgaagcggatgtcagtcaagcttagtaagtatggtcagcgaggtatccaaaagagttccgaggggttagcttgttgaaagagcgagaaaagttgaaaacatactggtatgatactggtatggccttttagtacagtgcccggatcgctagtggtatgctactagtatggtctccggtaacgtcagcagtacatctgccgggcaatggccaggtatgtaccaggtcgtctgtggtgtagaccttgccgtggccgagtgccgggagcattgactggcgcttgacggacgaggcggcgagcggaggtggagtgccgaagaccgcctgccagtagcggccggtcttcaggaagagcgactggccgccagagccggtcaggatcttgcggtgctgggcggagatctgggcaagggttggagagagtcaatgctggaagaaggccggaaaggggcaagactcacgaggtggccgccgtcctgggattggcgccgcgaggcgccacccttcgacggcccgttgtaggtgccggtccagccgccgtcctgccggccgttgccggcgaggggcgagccggtgagatcgatcaggcgccgcctgcgggcgctgacgatgcagatctgttagagcgcctcctcgaggccagcgagcgtgagcggaccgtccatagccaagtgtttggcaatatggccgtgaatgacggccgctacgtggttgagtgtgaggacaaggagatgagcggaggagagcgatgttgacgatgccggtctggccgaaccgaaagatgagctcgaatgcggcaagcgggtgcgaagggaggcagtacgccaagaggacggtcggcgcgaagaggaggagccactgggtggccttgtcgatggccgggagtcttcccgaggcggcgacagcgacgagagtgtggaaaacggcgagcgagcgcgagtggaatgggtcgactgggaggggtaggggtaaggactggcaaagaggggaaggtgagccaggacaggggcagaggacgcaccggaagccgacgtgagctcagccgtcgacgaaacttggggaatgcctcgacctcgtggcgggaggtgacggaacctcgcgttcggcgttgatgaaaccgcctgatcagaagatagggagggcccagcgaatgagaacattggttcagacgagggggaggacacaatattgagcgagaagaacaccttggccgctgggtgtgcgtcgctgagtcgcagcgacgcggccgacgtcatcggttccagcgtgccgacagaggtgttggcacaccggaaccggacggtgtagccggccgtgatctcaaagtgcaaggtctgcccggcggcgagactggaaggtgacggagtgtcagtggcgaggcgacgaaggaggggatggggagggggtgacgcaagggctggacttcttgccaacgtcgacggtgcaggcgacctgaagtaggatgctggagggttagcgccaaagtgggggagagtggagaggggaccgggcgcactggaaggttgctctcgatctgaagagtgataatgggggcggacatgggtgggaggagtgatgtggcgataaactagggaggtggtgggaaagtaatgagtagggtgtgtgtgtgtgcaagacgaaactgccacctcttgcctggttatataggctggggggagggaaccgtgacaactgattcggacctgccgcgggccaagagagctgacgaggtctgcagaaagagctgacgaggccttggggggccccagagaccaaattcggaggttctgaacgcggacggaggttccgctcctcgcttcagtggatcctgcaccgtttccgagctcgctcacaggcttcgggcctctccttcaataaggtctctagttcggctgaatttagggggcgtgttgaaaagctaggctattcggcgacgctatcaagcgacgtctgccgcgccacctaggctttaaggccgagtcctcgccaggcattgcaagggcgtgtttgacatcgtatgaactgaaacaggtcgctgttaagcataccctcagcgaaggtgatcacggctcacacggtcgttatccgtcgttatgccctatcatctcagcttaattctagtcagaggtcaaaagaagcaaggccaactgcctactgcgcaattggtgcgtcatccatcaacaggagtgaccggtttcctatcagcctgccagcgtccactgagctgctgctcagtctcgtcaagctcgggagcgtagtcatataatgcgcgcttggacccactgggcagaatggctcacgtgcacttcttgagagggggcagctctgggactgtgtgccctgtttgttgactcattgaacgaagcgtttgcctgtcgtcgctcaatttggaatagcagcgtgtctgcttcctcgaacgctttgaccctggcctcacgctcttttatccggacaaggacctcgcacgtccctcgatggccgccctcctcgccctttgagagggacgggccacctcgtttgtcagtatccgctccgatatctacctggatccgggagacaacgctttctcttgacgggcccgttggcggcgtccgcgccggcttcggctgttgcgtttgtcgcaccggcctccagtgccgccagtgttggagttgcgacgagtgcggcgcggcgcgcagagccagcggcggcagcaggcggctgcgcgcgcgctggcggccgcgcgcctgccgatgcactcctgacgcgcggactgcatcggcattcctccaagaggggggacgcacgaagacgacggcggtgacattgtcgttctcgatccagtcctccatgtcgaccgtctggcccgagtggatgacgacgatggtgtcggcgcaggtgcgggcaacctcgttgatcaggccgtcagagttgtgggcgagcttgaggtcaaggcggtcggcgcctgtgatgcatcgccaggtcgattcagcgaggccctcttacgaagggtgagccgtgggacgcaccttcagcttggaaggccgacgcaaagacaatgcacttgtcggcgatcgaggcgacgttggtgatgtaagggtagtggatgggttcggtggcaaggttccagtcgacagtcaccgacgtatgccgggtccggtcaaggatgccctcaagaggcgagatgacgtagggggcaattccggcgccgctaccgctacccaccgtcaccgttccgttgagcacacgaggagcggcggcggtggatccgccgatgacgatggacgctccgccagggttgtcgtaacagctgttggaggggccgcatccagtgaggccatgctctggaagagccgaggcgagagtgggtggtatcaggggagcaatcagagggcggtaccaagcagtggaggaaggttcgcaccaggcggagcggcatcgtcgccaaagacggcgatgcgcatcatgacgtggtccgagatcttgatcggaaggccgagcgacgagttctgagcgttcttaagcagactaaaaagggcgagcggaattgatcagctcgagcttgtccgaatcggtaacggcggcagaaggtagtcactcacgtcgccgactcctcgccgatctgccggacaaccttccagtggtcggcctggacgttgacgttctggttaaccgcgaaggcgccctgcttggccagcgtgaaagcgtcaaagttgctctctgggtagtcgctgttgtcctggccgaggtggtagtagggcgtgaggacgcggatcgccatgtcgttgagccgggcctccgagacggtgccagcgcgggtgacgttgatgagctcgtcgccgaaaaacgcgccgaggatgccattgaatgctgtcccgggcatgcacgagtcgagaccgtaggcagccgacttgtcggttgaccaggtccctcccttgaggatgagcgaccgtacaaagcgggtcagctcagtgagaaggggaggacgggcccctcgatagacgacacacccagtccgagacaacgtagccggcaaagccaagctcgcccttgagaaagtcgttctgaagggctgaactttcgcaggcgtgctcgccgttgaccgagttgtactgcagtcgggcgaggtcagccggcaggccgctcgaatggagcggacgaagaagcgacactcacggcgcacatgaccgacgcgacaccagcgcgcgtggcctcagcgaaaccgggtccgtagagttcgtgcatcgtcttgtcgtcgacgaccgcgtcgacctgctggtaaagggccgtcaagttgttgagacgattcgtccggtagagcgtccggtacgattgctgctcgtaggcgatgaagtgcttggcgcaggcctggacgccggcatcctggatcccgcgaacgcttagcttggacgcgacgccgttcaggtatacgtcgggagcgaagccctgatgcaagagcacgccacgagggagggcagaggtcagcctccgccgtcggccgactgctgtcccatcgccaagaccgacctcccagttgcgaccattgagaggactgcggccgagaggaccgccagtgactggcgagagtgcgaggttgacgcctgcaagattgagacgtgacggaagagtcaggtcgacgagcgcgagttgcaggacctagcttgggacccacccttgcccttgaactcctggccgatagcgtgcgaacgcgcatagatgaggtcgtgatcccaagtggcggcgacggtaacgccagcggggaactgcgtgacgccgacgacaggccgcggtctgtgagagggcgcaggggtgctgggtcaggcacgagacccagaggcggcagaaaagaaaggaggacgaacccaacgggaccgtcagcgaaacaaatcgacttgatgccgagccgctcgacagctccagtgttcccgctgcgtacagacaggacagccgtcagctcgtctgtggccagagggagggtgcgacgtgactcacacgcaggcgccagggaagcccgaggtgatgttgaccttctcctccagcgtcatctggtcgacgaggcccttggccttgttgtaggcatcagtccaggcgacgccgccggttgagatgggcgtcgtaaaattagccgggaccgggggcgcggcgtgcgggtcggtgatgttggcgccgctcgctgtctgcgactgccgggaaaagaggaagggcgtggccgaggccgagtcggcgaggcacgtcgcgacggcgacgacgaggacgggagagaaatgcatgctgaagggaagagggagagggaatgggaggtcaagacggccgacgagccctcgacggggctcggcttaagaacctgctcctcctgctcctctaatccggctctcgggccgtgtcgagacgacccgtgccctctcgtccggacgtcttcaagggaagtgtccgactcgccgtggcgagcagcaatgatcagcgtccgtcttgcttggttctgacgtcggcgttgagagtgctgtcggcacggggccggcctcaccgggcggccggcaagcagccccctagctcccgccggacagttgcgtcgttgaccgtccgacttggtgttgatgcgaggacggaccgagtcgtcttataaattatcgtgccggtaaagctggccatgttaatagttgtctaggacaggccgcggcgacctgctggcaagtagcggcagaagggatggaggagacggcgaggtcagtatgtcggtcggtcagctccgtcagccgctggccggacgtcccggctgaagtccgcctctgctgcaccagcaggccgggctgtgaccagaccttcgctcgtcgtctgccgagaaagggagcagcgtcgagcaagtatgtcgggtcggcgaggttggtcgaggtgtcgtctgcagggcggtatgctgctgcggcttctgctccagcctctgcgcgcgctgcttcgtcccggcgtctcaactcgtgccgcctcctttcttcccgtcgccctctcccgtcgcgtcgccagcccgccttcttctccctcgatgccctcaatcctatccgtcgctggtgctgcttgccgagcacaagtcgcttcgacctcggccgctacgtcgtcttcggccagtacatgacgagtcgatcgtccgatctgcgtctcgaagagatctacagattctcctcactgccgcgctcgctcagtatcagcaaagcgagctgggtctcccgagctgaatttcccgtgagtgtccctgtcagtccagaccggtgcgagctgtctgacgcagtgccgatgcgggccgatcagcgtttctggctaacgagggatccggccgcctatcgatgcgtcgtcgacgaggtcgtcaggcacgccgtgcgtgcggaacctccgcccgacttcacttggtagccgaccagccagaaaagcacacgtcgccagggccagcgatccaaactgaccagacataccctctacatctctttgtgccgcagatggccctcgtcgccttcctgcctgcgctcaccgagggctactcttcgcggccggcgcgcctgtacgcgcacgtaccgccccgcgcggcaacggtcgaggacgactggccgcaagcctgcaccgtcaacccaagcctcgtacgtgctcgtctcttctctctgcgcaccgtacgcctcctgctgtcgtcgctcgagcgagaatgtcagatgtgctccacgaggcgtgtcagcgtccctgggtcgcgtcacctgagcgcgcgcatgtagtcaaccaggctggtcgaccactcgatccgaacgtgacggccgagaagcagcgacgtgcgaccctcccttcccctttcgccgcccgccattcgcagctgacggcccctttgccctctcctgcgctagatgggcgcctgggtctacacgggcgagaagctctcgaagcgaatccgcgagcgctacctcgagtctgtcctccggcaggacgtcgctgttcgtccctctcccctccccgtcctttcccccgcgcgcatcaacctcgcgcctgaccacaccttcccctctcgctcgcgctcgcgctagttctttgacacggtcggtgcgggcgaagtcgccactcgaattcagaccgacacgcatctcatccaggagggcacgtccgagaaggtcgcgctcgctgtctcgtacatctctgtctgtcccccttcccatcgtacttcgcccgttctccactcacaacctcgctctctgacgacccccgctccccgctgcccgttccccgcatcctgactgccagaccttcgtcaccggcttcatcctcgcctacgcccgctcctggaagctctcgctcgccctctcggccatcctccccgtcatcggcctcaccggcgccatcatgtccaagttcctcgtccgctacaagacggagcagctgaagcacgtcgccgattccgggtcgatggctgaagaggtcatctcgacgattcggaccgcccaggcgttttcgacgcaaaggaagttggcaaagatctttgacgtcgacgttgcggccgggacgatcctcggtcacaagcaaggaatggtcctgggcatcggtctgtgcatgatgttcttgtgggtttcgcgcgccttctgtatgccgggaggagtcttggttggacggccgctgacttcgcctgcatcccccggtcgtctcccagcaccatctactcggcctacgcgcttgcctttgctttcggcggcgtcctcatcacgaacggcgaggttgccgacgccggcgtcgtcgtcaacgtctttctcgcgatcctgatcggctcgttctcgctcgccatgctcaacccggaggtccaggcgatcaccaacgcccggggcgcggccgccaagctctaccagacaatcgatcggatcccgacgatcgactcgtttagcgacgaggggctccagccggcctcgtgtgagggcaacatctcgctcgtcgacgtcaaattccactacccttcgcggccgggcgtgccgatccttaagggcctgacggtcgacttccctgcgggcaagacggccgcgctcgtcggaagctccggctcgggcaagtcgaccgtcgtctgcctcgtcgagcgcttctacgacccgacggctgggaccgtcctacttgacgggcgcgacatccgctcgctcaacgtcaagtggctccggcgccagatcggacttgtctcgcaggagccggtgctgttcaagacgaccgtctaccgcaacattgagtatggcctgattggcacagcccatgagcacgcgccgtacgacgccaagctcgcgctcatccgggccgcggccgtcaaggccaacgcagacacgtttatcacggccctgccgaacggctacgagacggacgtcggcgagcgggggatgctcctcagcggtggccagaagcagcgcgtcgcgatcgcccgggcgatcgtctcggacccaaagattctcctgctcgacgaggcgacctcggcgctcgacaccatgtctgagggcgttgtccaggacgcgctcgacaaggcgagcgccggccggaccaccattacgattgcccatcggctctcgaccatcaagggtgcggcatggcgcgcccgacgccgctttagcccgcatgctgcacacgactgacgcttccccttttctccgctcgcccagacgcccacaagatccttgtcatgggcggcggcgagattctcgagagcggcacgcacaacgacctcctcaattcgtctgacggcgcctatgcccggctcgtcctcgcccagaagctcgcggccgcgaccgagaaggaggaggcgctcggcggcgcggccgaggccgacaactcgagcgacgagcacctgacgctcgacggacagacgccggtcgggtcgctcagccgggccgactcggccgagggcggcgaaaagctccaggagcagcatcgactcaagctcgagcggacggcgaccggcggggcctcgctctcgtcccaggtgctcgccgaccgcaagcagcgcaacgtccgggacgacacagccatgtcgtaccgcgtcattggtccgcgcatggccgccatcaaccgtgagtcgtggcggctctacattctcggctttatcgcctcggtcctctcgggctgcgtctaccgtgcgtcctccttctccctcccttttttccggggcactgctctgacgcttcggttcgcgcctgttccgacctcgggatggcagcggccttcggcatcttgtacgggcgagccatcaccaatttcagcgagtctgaaaatgaggtcatcagagcgaaatcgtacaggagcggcctgtggttcttcatcatggctatcctcgcgagcatcatggtcttcatccagaacaactgcctcattcgatgtgcgtcgagaggtgacctcttgacctcttgtagaccggtcgctgacgcctacggccgccccttaccgcccacccaccccctgcagcgtccgagacgctgacggctaagctccgctcgctcagcttccgggccattcttcgctccgacgttgcctggtttgacgaggagcgcaactcggtgcgtcctgggtgctgaggtcgaaacaaaggagcctgtcgctgcaacactttcctccccccacccccgcctgcgcagaccggcgccctcacgtcctctctcgccgacaacgctcaagccatcagcggcctcgccggcgttacgctcggaaccatcatccagtcgattgcgacgatcgtcgccggcgccatcatcggcctcatctacggctggaagctttcgctcatcggaattgcctgcatcccgctcattgtcagcgcaggttacatccggcttcgtctcgtcgtcctcaaggaccaaaacaacaaggccgaccatgaggagtctgcgcagtgagtctcgctcgccgcggtcgcttggcgtcgtttcgacggcagcgctgacgctgcgcgctcttttaccaggctcgcgtgcgaggctgccggcgccatcaagacggtcgcctcgcttacgcgcgagaaggaggcctgcgacgtttactcggcctcgcttgacctgccacttcagaaggccaagaagacgctcatctactccaactttctctacgcgctctcccagtcgatgtcgttctgggtcatcgccctcgtcttcttcatcggctcgcgctggatcgccgacggctcagtgcgtctacagccgtgaggcggccctttctcggggcgagcgctgaccttcttccctccctcctcgctcctagctcgacatcaacgccttcttcgtcgtcctcatgtcggtcgtctttggcgcgatccaggccggaaacggtgggtgccggtcaagactcctcgctcgaccacctcgcacgagagatgctgacctctcgcgccgacctgctgcccctagtcttcactttcgtgcccgacgtctccaaggctcagtcggcggccaccaatgtcctgcgcttgctcgaccaggtacccgagattgacgcgctgagcgaagagggcaaggtcctcgcccgggaagacgtccagggccacatcaagttcaacaacgtccacttccgttacccaacccggccgggcgtccgcgtcctccgcaacctcaacctcgagatcaagcctggtactgtgcgtcctgcgcattgcctcgtcgacccttagcgcctgtgtgctgacccagccgctcttcgttcctccgttcccgctcgcagtacgtcgccctcgtcggcgcctcgggctgcggcaagtcgacgacgatccagctgattgagcgcttttatgacccgctcacgggctcgatcacgctcgacggcgtcccgatctcggacctcaacctcaacaccagagaagagacgcacctccaagcacaagtcgccagccgtagcgcagagtcgggcgaaacgagcgagccgagcgagattcgaaagacgactagaccggtcctgtactgcacgaggaaggggatgagagaggagtcggtcaaggctcaggcgagggaggcagacgggcaggcaggcgaacggcaggcgaagcgaagagggcatcagcttgccgacctccttggctcccaccgcgcgtgcagcagcgcaagacaagccgtcagcgagagggtcagcgagagagtcagcgagaaagtcagcgagagagtcagcgagagagcgggcgcgtctgaagccagggcaggtttgaatgagctgccttgagtgagccctgagcggtcagcggccggtgaagtaatcagcgaggcgcgcgctagcggttgagctcgccggccagaggagatcggccggcgcgggcgaacgggctcaccaatctgcgccattcttgcagtccggggaagcggaggcgagccacttgccggggttgtcgatgagagagagctgctaggcgggggtggcgagggaggcgggcgggagacggcggaagccggggcgaggaggaaggggcatgagctcgcggtggcgactggcccgttggcggccatcgacctatccacccctcagagcaacatgaggatgtagagggagcccttctactcacttggtagcttgggcgacagtcgcggagcagtgtgtggagaggaaggtgggaaggagatgatggtcaggagggagggagcgacgcgcgcgccgcccgccctttagcccgaccgaccggcagtcaggggcgactaaaagtttagcttaaggggggacaaaaagtcgccctggtattataagtgcctcctcataagtacccttgaaacaagtccccccaaacgggacttttgattcccaatcgggaccaaaagccctgcttttgtgacacctgtgctcgatctgccggcgtcgacgccagccgagccagaaaaccagagaagaaagacatttgaaacgctggcagtgaggagtctggaagaggaggacgggctttctagccctctacgaaacggcttggacgaggaggttacagttgaagggggagcggcgcgacgtgaatacagtttctttgccttcgggtcgagcgagtgagggaaggacatgcgggagagggggttaaggcaggccgggaggggaagccgtcgagctgtcgggcgaccgtccgaagcaggcgaggtatgagcgagcggagaaaagggggccgctcagagcgagagtccccgggcggcaacctcgatcgggtcgacgagcgactcgcccgcgcccgcctggccctggcctcccgtccgactaaagtagacgtccggcgcaacgcaggccgaaaccgcccggcgcatagcgaccgtcaagaacgagacgccaacctggaacgaggcgtttgtccagccgaagccttcacgggcgacaaacttgaagtcgacgccttggttgccgtactctgcgtcgaccatgtgcgagagcttgacggcgtcaaacttctcgggcacgacgccgttgactggcgggagggagcaatcaaggtcagctcctgccaagatagtggcaaaagggcagaggttaagtgaacgcacagtcgacaaacgcgaccgtcatcatgtagatccaccggtaggcgagccggctcgcctcctcgatgaaaccgtagcgctcgaggccgacccaggccatgatctgatgcggcggccaggcgtacgggaagtctgagccggcgtgagggcgggaaggggtcaggctgcgatccggtcaagccaggacgagacgaaaggaacgacgaaccccactgccggttcggccgcgagagcgagatcttgccgcgcgattcttcggtgcccgagacgaggccgccgaggacctcaaacttgccgagcgagtggcggctggggcgcaggaggggacgaggagtaagggggttcagcgacggggtcgaggacgagggccgatgcctaaggcggacgtacacgagcttgagcgcctggtcctcgctcgcgcagccggcccagagcggccagaacgccgtcgcactctcgtagcggctcatgcgcttcttgaccgtgtcatagtcgtagtagagcttctggccctcgttccacaggtaccggtcaatctgcttcttgcggtacgccgcgcgcgcaaaccactcctcggacgactggcgcttggccgtcgatcgcggccattggtcgttcgggacggcataggcctcctcggtcatcgggaagggcgcgagcgggaaatcgtcgtcgagctcgatcgagtcgccaaagacgtcgcggatcgccgtcgcaatgtctgtctcgtacttgtagaggagcgcgttgagatcaatcgttgccaggttggcagacttcttctcgagccggtacgacgtgtcgtggccggactgaacggaaaaggaagcacgggcgtcagcagctagcaaacgggttgagatcgggggaggagcccgcccggagggggcgcacctcgcggaccgagcggtcgtgcaaaaagtactcgtcgagctcgggctccttgagctcgccaaagttatacgcgtcggcaaactcgaggaccgacagtccatgcttgtcggcaaacggctggaggacatgcgtgaaatggctcgcctcggtctcgggcgggatgccgagcccgtctggcctgaagcgcgagaggccggtaacggggtcgatccgcgggagggcgacccagaccgtgtggtactctttgatggccgcttggatcgcgcccttgagccagatgttgttggccttctcctcggcccggtcgagctggttgtacgtctggagggccatgtcggtcaggaatggcggctgcgtccggcagaggtactggcggcaaagaaggaggggggggggtcaacgaaggcgcggggtctgtcagacgttaggcggacgtacgtaggacctcgagccgttgagaatcttgccgtagtgcttgatctcgaacatgaagtgctcgaccatgccctttgccatctcgaccttgccgtcgatcagcagccctagcgagataaagtacgagtcccagttgtaaagctcgttgaagcgcgcgccggggacgacaaaggggatgcccttgagcgtcggcttgcccgagctagggtcggtcgtcttgcgcatggcgagcgcgaggatgccagggcggtcgttgagcgactgaacaaacgccgggtcgtcgcagatcttcgggagcatctcaacctgcagcccgaggtgcggctttgccttggcgacctcgcggtagtactctgccatctcgggctctccctccgggacgtaaatcagcggcttgctgttgctcgtccggttctttggatccgcgcagatgatttcgagcccgtcgccgtcgatccggcgcgtgagggcgttccaaaacgagttccggatcatgcgcgtaagccggtcgaccgggttctcggtcaggcgcgcttcgtcgaggacgatccgcttgcggccgtagtcgcgagcgagggcgagctcttggagcaggttcgagagcatgtaggtcccctggcagaggcggcgacagagagcggtcggtcagccttggcgtagggcggcagcaagggcggcagacgacggctcgaggagggaagaagggcgaagtgggcgagagaggcgagccaggggtggatagcctgggggagattggttggggggcgagccagcactcacccggacgtcaaacgacttgtgcccattgcttgtcgccgtcccgagcgtcattactttaggcccgctgtcggtgatcgagatctgaaagtcaccgtcggtgtcctcctgctcgagcacgagtcgcatcgtctcttcaacgtcgatcaggaagcggcggggggccgttttagatttctcgtctgcggggtaaaaaggaaggggggaggggttcccccacctcgcctcctgatgccccctcctcttcccgctcgccagctgtcgtactgcaaatgcaactgcttcggcaacgcgacgacgctcccgctctatttcccgaccgacagggaccatccgtgcttaacgtgcacgaagcagtggtgtctgtgcgttcttcttctggctgtggcttgctcgccttcgcgcctgcgtaaggcaggaaggagggaggctctggctcagtgcggtgtctgggcatgagctcgcggcgagctgacgctcttccgccctaacccttccctcgacccgctcacaccgtcccgcttgccccaccccacctcgccccgtccaaacgtggacaactggcagcgaccagaagctcccgatctgcgtcggcgccaaggccggcgacggcgacctcgacacgggcaccggcaaggaagggagcgacgtcgaggccttgtgcttccgtgcgttcgcccggcccccgtccctcgctcctcctcggcccttctgtcgagggcctgacacacacgcagcgctgacgtttcctcctctccccccttttacgctgacttgcttctgcacctgcttgctcgcgcgctcgctcgcttgctcgcccgccctccgtcaaaccagagcgcggctcgcctcgcgaccatacgattgtcctcctcttcctcgtgactgtctctggcctcctcctgacggccattgcacgccgccatctcgctcggcaagggacgacgttgggcgaggtgtgggaaagggcgaggaggggcttgccggattgggctgctgcggggagcagcggcggtggaggagcgggaggcgggagggagacaagcgagcgggacggtgcggggaggtacgtcccggtcgcgtcgtcgacgggcggctcgtgagcgcgtcccgatcttaccccgagagggaatgcaggcatgcgttcttgcagtgcatcagcccgacaccgagcgagccgtcgaaagccttggacaggcagctcaccttccgcttaggtcggccttgcaaacatggcggcgcaaagaaggaaagcagcagagagagaatcgatacaaagagcgcgcgcgcgtggcgcgctgcaagcggcggaggaaaagagcgggcggaagcagcgaggtggaagggataccgacgaacgggccgagggaggacgctcaggcacccgtgccgtagattgaaaggtccttcatctcctggaggaccgtctcgacctggctgtcgagcatgccattggcgtagtcgtcgcggatcgtctcgccaaagtagctgtgcacgggggcggaaggagagcgcgcggggggaaggtgtcagcttcgagcggcggcggggcgctcgggctaggaaaggaagaaagagggcgcagagaacgcaccgctggacgcccgacatcttctcgtagccctcctctgcaaacttcaactggcaacgaaccatcgcctcgaagctcgggtccaaatacggcaccctgagctcgaccaactgcggcaggccatccatgagggtcccgttgaggacgtcgtagacctgctcggcctcgtcgttctcttgctgcgcacgagggagcttggtcacgtcgtccgagcccttttcggcgagcttgcgcatgcgcgaccgggcggcgtcgtagtcgagcagctgcgggaagagagcaggagggccggggggtcaatctggggggcctttgcgtaaggtgcacagcgtgcgagtagggcgtgcgcgagcaagcgagcgagcgcaccttcttgttccgcttatcgatcgccccattgaccgtcgtgaaatagctacagaaccgtccgacgggctcaaggaccgtatgccgaaagggagcgtcgaggtcccgtccgacgcccgagtcgagctcatcgaccgcccgcttgtaggcgtggccggccatcgcgccgtccgatgaaaggtcggcggcagaatagaagagctcgatcgtctcggccaggcgcgactcggaggaggtcatcgctgcgagggagggagggggaggagggtcagcagattgggcgagagcaatgggatcgggcgtttggaagggagagctctgccagtcgtccgttccccaacaccaatcgaacgacaacctcctcccgccctctacgaaggccctcattcgacttcccgcccgaccatgaaaccgccaacaaatcgctcgacagttcctccctggccgtccggcgcgccgtaccctgtagagacgcgctcaggtcgagcccctcacttccagcagcatccctctcgcgctgccaagcccccatccgctcaaagcaaacccgccaggacgccaggcctcgggcgagcgagcgagcgagagcgagagagggagggggataggaaacgggcccctgcttgacaggcgggcgggcaggcaggcaagggtagggctgcccgactccccgaccccccgaccgagttcgagcgagaccctcgtcgttcagagacgtgacagatgcgttcgtcgagagcgtcgcgtagcgagcgagcttgtgcgcgcggatgcgatgaaagtagcccctgccctcccgcatactggccctcttcacccccttctccttccgcgtttgtcgaaagagtcctccccaccacctgacaaccaacggccaaacccaacgccagagagcgggacgacaagacgccagcgcaacaggccctagcggaaagaacgcaccccgcatagcgtccaggtacgactttgcgtccttctggagggcgttgagttccttttcgaggctggcgcaggggagagacggggggtggggggagcggtcagcgttttggacgagcggtgggtgacatgcggctggctagcaggaggtaaggaagggagggcaaaaaggaggggcaggagcggaatggtaggaggccaggcgaagcgatggaagcaagcttcgagctcgggcgaggtgctaaagctgagccgacgccgatctcgcatgccagcctgagcctgcgccgagggggatcgtcgagcaagctctcgctcgcgaccctcggctcggcttgcgtccgctcgcctgcactcgaaacagagctgtgcgagctccccctcgcccgcgggagagcgcaatgacggaacaggaagaccgaaaggggtggaaacgcacatcctgtactttgcaacctcggcgtcaaactcggtgtcgacggtccggtcgacctggcccgtcttctgcataagcgtcgtgcctagataagggaaggagggcgacgtcagccctctctcttggcgcgcatgggagagaggaaggaagagagacgccaggagcagacggaccagcgcggttgaagctctttttgaggccgttcctgcagatgcatgaggagtgttagcaagaagaggaggggctgtatgcgcgcttgtcggctgaccaggacatggcgggcgacttaaggcggggggagagtgatggtagaggaaggagagcgcagtctccgatcgcacctctcggggtggattgatgattcatcctccggtggcggctgattcatctgtcgggctgctcgagacgcgcgcgacttctctctctcttgcccgtcgcgtcggccgtcgtcgcgtccttctcgcctctgtcatcccctcggcctataccctctagactctccttctcttctagccagccagcgccatccggccacgcgagagctccatctcgattatcgaccgaccgagcgagcaaccgactgtactttcgggccacttccagcagcagcagcagcagcagcagcagcaagcacgcgccgagaaaaacaaccgccttcctacctccttccctccctctctccttacggtcctgctcgccgctcttccgccagccagacaacaatggcgtcctacgatccctacccagcgccttcctcctcctcctcctcccatcaccatcaacagcaacagcaacaacaccggccctcacgcccggctcctccccgcccgtgggggggaggggggaggtcgtcggtggcgcaagtgctcgaacgaccgcaacctaagtcaggacgcgagatgaaggcgacgcaccaagcaagacgccgaggtcaggctcgtctgccgagccagctgcgttcaacccggccgcccccccttcgctagtcgagctttggccttggccgttcgcaccgctcgagctgctgccgctaccaccagggccaaagacgtcgtccgtcttagaccgcttcatcccgcgcatgggccgcacggccgcacggccctgcaagccctgaccgggccggtcgtcgtgctcgtcgccggacgagtcggacaggtcgtcccggcctctacggcggcttggcccgctggaaggagggggcgtgccgccggctgaggatgggtgccggtggaacgaggctgttggccgaccggctccaccgggcgaggacgacgggccggctggcgagcctgccccgccgccgccgaacccgaagccgaatggggcaacgccgccggcatgctggttggcagcagcagcagggaacgaaggcgaggcaaaagccgggccgttgcgtctgagagggctgccgaaggagcctcctgggccactggtggccgacgtggatccaggaggaggcgtcccgcccggcgacgacggagcgtagtgcgaccctcgcgggaaggcaaagccgaagccaaggggcgacggctggtgcggaaccggagcggggggaaaggacggatggacgtgcgccatcgttcgattggaagaggtgatggcagagggggtgatggtgggaggcgagaggaagtgcaaccgtcgggcaggcagctttggctcggcgccgtcgctcggctcgacaggccagccgcttcaaggccttgtctctctctcatgatctcttgagacgcatcactaaggcttcatgcgcagaccttcctgtcatgctgctgtttcatgcgagcttagggaagggtcgaccggcggttgtgacctgacggcacgagcgcctccgattgacggcgcagcaccgtcatcgaccaagggcgacgctcgctcagcctgaacaggtgatttctaactctccacagcagactgatgagtcgtcaagggtcaaacggtgacgccctgtcctgtcccggctttctggccgtatgttgatggctgattagcaacggcgccagcggaaacgcgcccaacaggtcctgtcactatcctcccctccgcgcctcgtcttcccgttagaccctcaagtcggccgtgttgaaccggcaaggtgtggatgttggacaacaagcatcgcgatacaagagcggaaaccgactcacctgagcgggacgcgagcttcgtggacccccgtccgaccatccggcgaagagcgcactgggcgactagcctggacggttcctcctgttcaaggcaggctagccccgtcgaggcaggccagccccatcgaggcaatgaagcccgcaatgggtcgagcccggcttcggtcgaacgaagggggtgaggctagtttcaaacggaggacgagcattcggtcagtcttggctggtcgacgacggagtggcaggagacgagcgcggggaatgtaaagtgttgttcagtcgagtaaatatgtatgttgtgatgggtctcatcatgctcctccggagaggagtgagaaaggtaaagcgattggatgcatcatttggaggggggagagggagaggagagaggcgacgagagaggcgacgaggacttacgagctactgaccgagtcgtctgaccagcgccaggtcggccagagtcgctggaggagaggtcagtcggagatgatggccgtcagttgtatggtcggtcgaaaacggtcgggcagggctggccggtctcgtgcgcgctttgagcggtgcgccggcttcgcgccccacggccgcagcgcgcccgagccaggccacgcgcagacagcaccgacaggccagacagctcagaccgatatcgctcctcgcctcctttgtctctctcttgccagcagagcacacatcgcgccgagcatgtcgctcaccccgacaccgggcgaggccaagaagcgggtcgtgcgtccataatcaaaggcctctgcgagctcgcctgcgcgtcctccgaccctcctgcgaccctggctgacttcctccctcccatcgcctgctgctgatgccgctcagtgctacttctttggtccgtccgcgcgctcgctcgaatgtcgcctgatgaggccgtcgctgaccttcctcgcttgctttgacagactcggacatcggcaactaccacgtccgtcctcgtctcggagctcgcggcgctcgctcacccggcctcctgcgagctgacacgacctcctcctcccttgccagtatgggccaggccatccgatgaagccgacgcggatacgcatgtgccatgcgctcgtcatgaattacgggtgcgtcgctccttgggctggccttgccagccgagcgagcgctcctggcccggctgctggcttgccgacgcgaccgaccgcccgaggcttagcctcctgagctgaccttgtacacaccctctgctcgcgctccagcctgtacaagaagatggagatcttcgtccgttcctccttgcgtgctcccgttgcgcccttggctctgacgcgccccgcgagctcctgcctccctcgtcttcccacagcgcgccaagccggcgactaagcgcgagatgtcgcagttccacagcgacgagtacgtcgagtttctccagcggatcacgccagagaacatgaatcagtacacaaaggagcagatgaagtgtgcgttcctcccctcgctcgctctcggctgggagctcggtcggccggcctcgagcgcgcacgcgtcttgctgacgcccccctcgcgctcgatcatggcagacaacgtcggcgacgactgcccggtgtttgacggcctgttcgagtactgctcaatctcggccggaggctcgatgggtgcgttccatcagcgtctccttgcgcaagaggctcgtgagaccgcacggctgacgcgtcgttgggcgacggctcggcgcagagggcgcggcccggctctcgcgcgacaagtgcgacattgcaatcaactgggcgggcggcctccatcacgccaagaagagcgaggcgagcggcttctgcttcatcaatggtgcggtgtcgctcgcgcctctccggcaaggcgctctggccgggcgctaaccagctggcccgccccgcagatatcgtccttggcgtgctcgagctcctgcgctaccacgagcgcgtcctctacatcgacattgacgtccatcacggcgacggtgtcgaagaggccttctacacgaccgaccgcgtcatgaccgtctcgttccacaagtatggcgagtttttcccgggcaccggcggcctccgcgaccggggtatcggcaagggcaaagattatgcgatcaacgtcccgctccacgacggcattggcgacgaggcgtatgcgtccatcttcaagccggtgatccagaggacgatggagtggtatcggccgaatgcggttgtcctccagtgcgggtccgactcgctcgccggcgatcggatcgggccattcaacctcagcatgaagggccatgcagagtgcgtcaagtttgtaaagagctttggcctgccgctccttctcctcggtggaggcggctacacgagtgagtcgggttcgactttggcagcttgccctttggagcggtgcctgcagggctgacgcgcgtgccatctatgtcctagtgcgcaacgtcgcccgcgcctggtgctatgaaacgggtcttgcggccggcgtcgagcttgggtcgagtacgttccgctctcctccgcctccgcccctcgccagcgcaagactggcggcctttcggcgaccgactcggacggcgtcgaccactcgaacgccgccccgcagggcaaggccatccagcggcgggccggcagcagggacgtccggaccgcgcagcgagtctccttcctcgatttgtccaagtagagggcgtcctcagctcccgcagagctcgactgctcaagacgatgattgcatcgagctgctttctgggtacctctctctgctgatcatacgcaatacagatttatctatgttaattgcagacaaacataatgcgttggggatttagctcagttggtagagcgtatgcttagcatgtataaggtcacgcgttcaattcgtgtagtctccaacagcttgtcaagagcttcaccttctttttgctggccgagcgacgctcagcgataagctgaatgcacaagcgactgtcttcgtcaagggccatctgggccccaaactgctcctcgccttcccagtggtctgtgatcaccgagggccactctgcactgcgggctggcaggagcgactgacggctgacccgatgtcgttcagaaagagacatcgattggggatgccgcgtatgcgattcaagagaagaggagagtacaggatgatggagggggggtgtttgggttggatgcaagtgggtgtgatggatcgtgagaggaagcgggcggatcagacggcgcgagtagggtcaaagggagcgtcgggcgggtgtgctgggtcgttggctggggcggtgctgagcgcctgtagattttcgtttgagggacgggaacggggacgaagagtgtccagaacaagagtcgtgtcgtgggtcgcggcgttgaagggtcccgccggccggtgagagtggaagaggctagatgcgaagagggccgctcgcgttgacgcgcggatagacgagaccagggggcggcgccggcgggtaggccatgtaggcggcggccgagggctgctgctgctgctggagctgcgcgagcatcggcggggcaaagtgaaactgaggcatctgggccgcatgctgctgctgttgctgctgctgctggaggaggaggacctgctgctgttgctgctgaagctgagccgtgcgtgagagtggatggtcgcggccggggatgacgccgatgtagggcccgcagaggacgggcgagatgagcgtcgacttgagcaggacggcgtagagggcgccggcaagcgcgaggtcctcgggtgaggcgacgcccgactcgaggacgttggcaatgacgagtgcagcgccctggaaggtgacgagggcgtccatctcgagaccggtgaggtcggcccgggtaaggatcgacatcaagtagaggctgcgggagggaggcataccaaggtcagcggggttttgcggccggcttggtgagggggggacagcagtgactgacaagggaaacgacttccgcttgatgtacgacttcttggtcgagaaggctgcctggcagagcgccaggataccttggagcgtgcgagcgtcgtacggctgaatctcgcgctgtagctcaatcgcgttggagatctgtgagcgaggagggcaagcatcacaagctgtcagaagggagctagaggacagctgagaagaccacgagggacgaacggtgatggtcacggggcgggcacgcttgccgacgccgaggacggtcgactgacagcacttgatgacggcagcagcggccttcttcgagacgacctcgacaaactggaaagcgcgcaagtcgttagcgtgtgaaagtcagttggtgagacgctcagaaaaggacgtacgaagaagtccttggtcttgccgtcggccgggtggatgagcaggtggatcgggtgcggattttgcaccggctcgggcagcgcgccagcgggcaggaagttgacgatcatctcgggcgtgacgtcctgaaaagcgaggatggcaaagagtcaggtcagcgtcaaagaaaggcaaagttgggcgcagagaaggaggtcaaggcggatgaggggggtcagacgtgaataaaacctgaagtcagcgaccggaccccttccgtgaaggaaagggcccgggctcagcttcattaaatcagtttgctgtagtttttggttgctcatcataatgaggtggggcgagacccgggcacgaagcatgcgcttgcgctaggacccctcgcagagagagggaatgaagagaaaggacggccggggcacgcacccaggacgcgttatcgaagcggagcaggaccggcttgccgtcgtcctcgattgagccggcagcctggcgggcagcgaccttggcagcctttgccgcgggtgaggcggcggccgcgaccaccttggggtcaggcgtcaggtggagcgtcttgaagtcttcaaccgtagtcgtacaggctgggcatcgcatggcaccgccggcgacgtcgcagacgacgctgcagagaagggagagacgatgcgacggtcagtgacggtcggcgacgatcgacagacaagcagatggcagactgacttcatgccgctggtgaagctgcgagacacggagggccaacgtcagcgagtgtgagatcacgcgcatgcagacggaggacccaccacttgcggcagaccgagcagccgcagggagagaccttgacgccctgcttgacgatgacgtcttcgcagctgccgcaggaccgggcggtgacgaggtcctcctccggcgcggccgcaggagcgtcgacggtcggcgacgtcgccgcacgccagacggccttctcgatcgcggcgccgacgccggcctcgaacgaagcctgccggtcagaggcctgagcggcggctgtcgtcggcgaaagcgcccgccggtttgcctgccaggtcgtgccggggcggaccgtgggtgctgccgtcgccggcgccgggcggagcgagggcttgtcggcggtcgcggccgtcggctggggcgtcaggaacttggcggtcgtcactggtgattggagctcggccgtcttgcgctcgggcgtcttgcgggccgaggcgatgcctgcacaggtgagggaagaatcaacgtcaggagcgagtcgacgtcgccgaccgtgtgagagagagacgaacctatgtcggcacggtcgacgacgttctcggtcgtctggcccttgtgcgtcgtcgattcgctccgggcgctctgaagccgaaggcggcggacaccatactcgacgtcgccagccgtcgggccggtgtattcgccgtcgtcgtcgtcctcctcgtcgtcggcagcctcgcggacctcgactgggggtgcaaaggtcgtgctcgagaggcccgtccggtgaaggggcgacgtatggtgacgcgagtgcgacttggagggcgtcgaggtcgccgggacgagccggccctgctgcttggcgccgcgcgggacgtaccggaggaggggcgtgcctggcgtgatggggagcgatggcgcgaggcgggacgaggcgccggtggagggcgtgtcgccgacgtccgagtcaaggccaggggtcgactcgaggtcaatgacggtctgtgacgatgggaggcgcgtgtcagtcaaccgtgcgacggtccaaacaagtgacagcgggttggcggatagggccgagcgagcaaggcccggctcggaggggtccgagcatgggcaccgttcgcacaagagaagaacaggactcacgtcgttgtcgttgtcgttgccgttgctgtcgtcgtcgccggccgacgactgctcgctgacggtccggcggcggaccttcatcgcgggcgtcgcgtagcctgtcgtgctccggaccctcggccgccaggagccgctgccgtgggccgggtggcgcgcactgcccgagctcgcgccggcacgagcaccggttgagggctgggctgtcgcggtaggctgctggccgctggaggtgtgggtcgaaggggcgcgagcggccggccgggcgggtgtcgcgggctgcatggctggggaggcgggcgaggagggaggacgagggcgaggaggaggggtcgagacgcacccggcagcaaaaacatctcgccctcgccaatctcgatgtctctgaagactccgtcatcgacgaccttgaggaccatcgcgcctttgacttggtaaaaccattccttgcaagacgagggcgggcgcagtcggtcgggtaggtcagggagtggactgggcggcggggcgagagggcggagagagactgacttcggtctcattaaagtggtctggcgcgcgggcagggccagcaaatagggcatgggcagggcagcagagagcagggcaagagaaggagtcgagtcagccctcgtcgtcctgatggatgatgatgctgatctcgccgctgacagtccctcctcgagtttggcccgccgacgaccatgacagtgtgatccttgccgtcgtagaggcagaagttgccaaccggcggctggagcaggtgtgcattctcagcgagccagcgcgggaagttgatcggctgggcgagcatcctggcaggggggcggggatgggtgtatgcgggtgactcctgaagggcggacggctgtatgcgggtcaagtcatcctcctctgaccaccaccatcgaccatcgaccatgcctgccatcaccacctccggcatcaagggcctcaacagcccgctcccgactcacccggcccattttgacatcaccaaggtcatccgacccaacatcctcgcccttgagccctaccgctgtgcgcgcgacgactttgacgacggcatcctgctcgacgccaatgagaatgcgctcggccatgctatcccggtcggtcctgctggccttgcttccgcttaagggctgaactgttgttctcggacgaggaattggcgactgacgacttgctgcttctgctgctcccccctcgccacctcgccctctcctccccttcgccgcacgccacttctcctcctgttaccagctttccgacccgttcctcgcccagctcccgccagacgcccagcttaaccgctacccctcgcctcaccacccggccctgaaatcgcgcctcgcctcgcttcgtgcgctcccgtcggccgatttcgtccaccttggcgtcggctcggacgaggtgatcgacctcgtcatgcgtgtcgcgtgtgcgccggccaaggatcgcatcttggtctgcccaccgacgtatgggatgtacaaggtgacggctcaggtgaatgacgtcgaggtcgtcgaggtgccgctcgtgaccgagggcgaagcgaggttcgagctcgatctcgacaaggtgcgttcgtcgcgagctcgcgcagcggatgactcgaagcgcgagggctgagctgactgactcccccccccctttctttcctcctttgctcgccgcctgctcccctctccgaccgctttttctctcgtccacccttgcccgtcctcttcgcccctcgccccgtcccccgtcccttctccccaaatgcccgcaggtcctcgccactctcgccgccgacccctccatcaagctcatcttcctcacatcccccggcaacccgaccggcacactcatcccgctcccgacgatccgagccatcctcgatttcccgcagttcaagggcctcgtcgtcgtcgacgaggcgtacatcgactttgccggcggcgagggcgaggaggcgagcgcggtcgggctcgtcgagacgtatgcgaacgtctgcgttagtcaaacgctgagcaaggggcatgggctcgcggcgattcggtgggtctatcctccccccccccccccccccctcccttttgttttgaaagaaggccctttccccctgcccccctttcccccccccacccttttgactggccatccattcccccccgcctggcgacccccccctgcctttccccccccccccccccacctcttcactttactttagggagagcgcctgctgaccttcgccccttttcgcgcccaaagcctcggcatcgcctacgccaacccggccctgattcaaatcatgtccaacacgaaagcgccgtacaacatctcatcgccgacggcggccctcgcccaggccgcactgacgccctcggcgctcgagacgttccacgccaacgtccagacgctccttacgaaccgcttgtggctttcgagccagctgttggccatcgacgggacgggcgagatcctcggcaagcctcacgccaacttcctcctcgtccagatcctcgaccgcacctccctccggccctccaacgcccgagcgaaagcggcctatctgaggctggcgacgaccgagggcgtcgtcgtgcgcttcagggggatggaggtcggctgcgagggctgtttgaggatcacggtcgggacgaagggggagtgcgagcgggtggtcgagcggctgagggcggtgttggcggaggatgggggtgaatagggggtcgggcctgagagaatacctctctcttgacctctcttctttgtcgctctcgattaaagctcggtcggtcgacgctctcgcatagacgcccccctcgcttggaatccctcatgacctttagagaccgatcgatggctcctcctaatttcccaacgggcaggctcacctggccttgccctgtcctgcccgacattttcccggcctgcctcgaacgaaaggccgactggacgagagggcctgcttcttccccacttttgtcccccccaccttcccccctccatttagcggaatcggttcggcgtaagggggagaagatcaagggggcgtctgcctggccatcgtcgttgtctgccgtttgaacggaaagaagaggtttcggaccggtcgactaactcaagggaggaaaggcgggaggagaggagagcgcgggtcactgcgtccatcgtgcgttgccctcaaccgacctcgagagagagagagaagggaggaggagaaaagagcgggacagcccctttcgcccccatcctcctcccaccttccacccccttcctgaccctcttgacagggacgcacgcacgcttctcgccgccctcgacatatgccggtcggccagagcgacgcacgtcatctctcctgctccccccttcaccttccgctccgatcgcctctcgcgcgcgccgttggtcgacatcctgcacgagttcggcctgggctgggctgggctgccgtccagttgatcgattgagtgaacggccaaaggctgacgggctaactgactacttgcgtgcttacgtgtttgagggacggacggaattggcagcggggccaaaacgcgttgatcggatccgaggtcaatcgggacgagctgggtaaagtcgagaggagttgggatgagtcaagtcgaatcgagtcgagtcgagcagagcggagagtcgttcaaaaaagagcaagtgagttcgggcacgagacgaatgaaagcctccaatgaacaaccgaccccgattgcggccgaccgaccgaccgaccaaacggccgactgctgccgaggggtcagctcccatctgcttccttcaaggctctactttgcccctccccgcagtcagtctgcgcatgcgccggtcgttcgacgtcgactaggcaaggaaggaaaagcacaacgggtcgttcgatctctttctcctaagccaacccgtcactcgccgtgcgagtgcgaatgcgcctgccgtcggtcaacgatgcccgcctttgcgcccgccaggaaacgccgggcgccctccctcaacccgcccctgacgtcctctcccgccgtcagccccacacgctccgccgcgtcctccaccgcggggctcgcatgcgctgcttccgacgcaagccgaagcgccgcgccggtcgagaggagccggtgagaaagggcagggttgcgggcgagggcgagatgcgagacctcgaggagtttgagggtctggaggagggaggctgaggatgtgaggagtgggggtagggtcgggaggtcagcgacatatccgtcgctctgcgcgcgaggggacgaggaggcgcccgaggtggaggaggagtgtgagggccggcggggggcgttcggaggaaccgggagggctgcgcttgcggtcgtgaatgaggagttagaggggaggcggtctaccgtcggcgagcatacgtccaggtcagtcatccgcgcaccagagcccgagccgcgaacagagaatgacggacctcgagcgtgcgcccccgcgtcctcgcgcatttgcagcccgatgagctcgggcagcctcccgcgcgtcgagcgctggaagagcaggacggtctgctcaagaaagttggcctggtctgagggccggtccgtcttgtagttgtatgggcgggagaatgtcaggctgaagtggccggcctgggaaggagcaacggcgtcagcgagggttgagcctgtggcattcgactgcgcgagcgagcgccgagcgagggtcgtgagcaagagcaagagagaaagaaggagggacggacatcgacgacctcaactctccggagctcctcgagcgcccacgtcttgccctttgagaaagtcccgttcgagttgcgcttcgctttgtggatgaagcactggccggagcgggcggcttgcgttgcaggtcgatcagcccagccgtcagctgccgtcgtcggtaacctgacggcaggagagaggagacgcacctgccaacatcaagtaccgagccttgaccccaccgccgcctgctgctgctccctccgtcgctacctcgccaacgtcgtcctcgaagatcttgacgtgcgcgacatacgcctcgtcgagcgagccgtcggcggccgagcggcgggagaagagcgaggtgatgatgtcgtgtttcgttgagctgctggcgcctgagctggagacggttggagagggcatccttacggcgggcgtctggatggggttcggagagggggattgagaggaaggagggcgaggtgaggtcgatcaagagtgaggtcgatcgtcgaggctgccggcgcgggccgaagagaggcggcttggacgtcgaaggcccgatagaagcgactcgcctgtccggctctgctgttgctataccgagctgctcgctaggcgtctctacgagcaggtccttctctgagccagagggagaagggaggaagcaaggaagagggtcgccgttgccggccagccgaccatctcgcctgtcgacgcgccttcttgcacgcgcccctacatcgaagcgctctccccgttcgtcaagtcgaaagccaaactcgtgtggctcgacccaaggatgtcgggaattcgaccctatcagagttcctcaagtccggaggcagtctggggttctggacgagagttctaacattgtcgcgccgcgcgcccgggtcagccacggagtaggccctgacggcgtgcgtgagggtacgtgtgtgacgcttgatcagccgggaaggggcgcatgcagatgggtggcgcaagtgccgtgtcgagaagcgggaggcatgtgagggaggcggcggacagtgtgtcgagcggggcaatgcaaaggtgaagagggcggagtctagtgagggcgggaagcaagccaggggccgaaaggggttgagtaggtttggcgagtctcctacgagaagagagtctgaaggagcggggggaattaagtcagctgatgaacgtcgacagagtccacgagccgccgcagcaaacgcactttgaggtcctccattcgctgctcatgcagctccttgcgactgatgttttgggcgagcgtcaggccggcaaccttagttttgcgcgcctggacctcgagcatcttttcctccattgagtcgtgcactgcgcgggacgttaagcgagcgtcagtcctgaaactgaaaaaggcaagagggaggcgacgcactgatgtacttgatggtaacgacgggccgcgtctggccaagtcggtggacacggtcgacggcttggttctcgacggccgggttccagtaggggtccatgacatagacccggctcgcggccgtcaggttgaggccgacgccgccggcgcggagactaacgagcaggacctcgcatgccgggtcggttttgagccggtccatcgccttgacgcgctcgtcgagcttcatgctgccgtcgagcctgtcgtagccgatgccagagtggcagatggcgtcctcgatccggtcaagcatcgtcgtccactgcgagaagacgaccgacttgatcggcttgccggttgccatgtcggacgcccaaggctcgccgagcggcggccggtcgttgacgtccttgatgatgacggccttgttattgaccgaggcgtcgaaggaaaagtcgttaccattgtcgggcaggccggtcgcctccttcttgactgggggagtcggcttgacgtcagtgccgttcggcgcgccgacctcgggctctgtcttggtcgtcggggggttgccatgaaggatcgatgacgagtcgttgagggcggcaggaggattcgtgatgaggtcctcgcctggcgcagacgtaatggcgctctgaggctggccgtcctcgccgccgccgcccataacgagcatgtcggtcatgtcgtcgtcatcgtcgtcgtcctgctcctgcatgaagccgtccttgctgacgccggccatgccgctgcggtcgccggcaaagttcttcgagtgccggttgagcttcgagaaggcgagcaggtcctcgagcaggtggttgatcttggacgaggtgatgaggtcttcgcctgtccgcggcttgcgcttctggcgcgacttgcgcaaagccgtcttggacacggtcgccttgccgttggcatcgagcggtgttagctcgatgcagtcctgcgtgagccggaggcccgccgtgcactgcgggcacgaccggccgacgccgttgatcgacttggggtacttggcgtagaccgacttctggaagcactcgaggcctgtgcaggaggaggcaggaggcgagagttagctcggaagtttgtccgagaaacgcagagcacgtgggacgcacaaaagaggtgctggcactttgtcaggacgccggtaagcggctttttagccttgcccttgcgtttggcagccgaagggtcctcttcggcggcgccaagcgagagcccgccgagactcgtggcaaggtcgtccatcggagtcttgcactcgaggcagtcgcagacggcctcctccttcatccacgcgaggaccgacgccgcccgcttccgggtcaggccgtgagtggcgatcgccgccgaggccgtctcgtagtcgagtggctcgccgctgtcgtcctcgtctggcgccgaggctgacgagtcagacatcagcagccggtggtcgcagatctgccggagccggagaatcttttggaggatgttgacgtaagacgtgctcgcgacgccgggcgcggtgagggctccggcgttcgccccgccgccagtgccctcctccttcgagtccatcatgttgttgaagtcgcgggccgagtctgcaaagtacttgtcgtagatgtcgcgttcgacgtcggtgaagctgaggaaacggatctcgtcctggcgctcgggcaggtcgagcagcgtcttgcccgaggcgagccgcgtctccttagtccggcggagggtaatgtgtcgcataatgatgagcagtcgggcgagtccgagcgagttgccactctttgccggagaagtgatgaattcctgccagacggcccggtcgtcaaacggctcgagccggatgaacttgatgagcgcccacaggtcgtcgagcttgttctggattggcgtgccggtgatggcgagccggcgctggccctcgaggtagcagctcgcccgggcggcgaccgtgttggagtctttgatgaagctgggggggggggggggggggggggagatgggctgagctgcgcagcgcgccgaggccgacggcattgagccgaagcttcgcagagcgacgcacctcaaagtcgggcgcgatggagccgaggcggagggtaggcatttttgtgatgaaagaactgaagaggggttggttgcagggagcgagaggattaggacggtcaagagagggtgaaggtcgggagggagggaaaggaagcaaaggcgggcggcgggcaacacgaccgaggcgcgacaagacgttggatgtcgtgattgcagcagagccaagccaccatcgcatcgcagcgtgagcctcgactctagtcgtctcctctgccacaacttaaggcactttgctgccccgacgctcggacatactgacagcaggcgctgcgaccagtcgttcacggaatcgacctttacgtgctcggacaagggtaggagaaggcatggtatagatgggaggaggagggtggccaaggcacttaggagcgctcagagagggcagacaggccgggaaggtccttgccctcgagcagctccaagctggcgccgccgccggtagagacgtgggacagcttgtcctccttgccggcgttggcgacgagggtggcggtgtcactgggtgggtgtaaagtcgcagtcagtgggcgcccgggagctcaagcaaagaggggaagacttaccctccgccaacgatgacagtggcgccgttctcgcaggccttgatggtcgcatcgaggagcgactggctaccagatgcgaaagcggggaactcgaagactcccgccggaccgttccagaggaccgtcttggcctctgcaacggtctcggcgaagagcttctgcgacttgggtccagcgtcgagacccatccagccgtcagggatgcccgactcgtcagtggcggtgtcggtctgcgagagcagacgcggtcagtggaggacccctcaatccaggtcagtgttgagggcgcaccttggcgtctttgctgaaggcgtcggcggtgatgtagtcgacggggaggacgaccttgacgcccttagccttagccttgtcgagaagcgactgagccttggccgcgccggcctcgtcgaagagcgagtcgccgattgagatcccgtcgatagccttcttgaaggtgaaggccatgccgccgcagatgatgagcgagtcgacctgcaagcgagcgagaggcggtcagacaagtggcgtgggcgctcgacctccgtcgccgtggctgaccttgtcgagcatgttctcgatcagctggatcttgtccgagaccttggcgccaccgaggatggcgaggaacggccgctcgggcgactcgagtgccttggcaaagaactcaagctccttagccatgaggaagccggcagcccgcttgggaagctcgacgccgaccatcgacgagtggccgcggtgggcggtgccgaaggcgtcgttgacgtagactgtgccgaggttggtgagcgacttgcggaacgtcttgacggcctcggcgtcggctggagggggaaaataaggggccagcggccgtcgtcgggtcagcccttcgggtttcggcggtcggccggccgacggcgcggctccgcgccttctttgcgatgggggagaaagagacggacccttggtcttctttccctcagagtccttggacgagccctcctcctcggcgtggaagcggaggttctcgagcaggaagacctggccgtccttgccgtccttgacggccttctcgacctcgtcgccgacgcagtcgttcaggaacgtgacgggcttgctgaggagctcctcgagctttttggcctgggttttcacggcaggatcagggagaaagggcgctgtcagatctctgcgaaggccatgaggcaaagcgcagcggacgaacgacaggggcgagcgagtacttctcgaccttgtggccgtcggggcggccgaggtgcgacatcaggatgaccgaggcggcgcctgcaattagcgtaggtcgtcagcgagctcatgccgaccgtcggacaacactgcttgagcgatgctacgtaccctgctcgatggcatgcttgatggtggggagggcggcagcaatccgctggacgatgggagagaatgacaggccgagggttagcaatggcgcccagtaaaccagcaggcgttgtccagaacaaagctcacggcagggttggtgatctcgccggtcgacttgtcctgcgggacgttgaagtctggagcgggcgaggaacggtccgaccgaggcgagagcgaacgggcgaaggtgaaaagaagggagagagccggcgggcggggtagcatcagcatcgccccgcagcctcgcagagcagagcggcgacagttgcgcaccgacacggatgaggacacgctcgcccttgagcgagaggtccttaatcgagagcttagaggagagcgacatggtgaagaaagaagagagatgtggttggggagagaacggagaagggcggcgaggaagcagcacagcaagctcgtcgcgcgcgcgcgggcggacgcaatctcttaccgcctctgcctccgaatccgtcgccaactgccgcaaagcgagcgatggtcgggaaagggtctcgcttctcggcaagtcgacctgcacgctctcggtaggtcgccctgccctcttctggtgctctcccatcgagaccgatatggcccaggcgtgcgcgctgacaggcggccgacacccgcgagatcgaccctgcgggccccctccgtgtgcgcgctccgacggagatgagtgaagcccgggtcgggcgtgatggaagaggggtttgctcaaggtcacgctgcctgactcgcgtcgtcgtcgtcgaagatggcaagacagcgggtcagagaagtgcgatctccgcctgacctggggcaaccgagggctgggcgacctgatggtctggcttcccgagggagggcgcagacggcgcttgaatgcgcatgccctcttgcctctcgaagggaagcagcagcaagttgcaagagaagatcattcggatcaacgagaggtcaggtacaggacagaagccgggtaggggtcgaggggtcggtcaggaggcgccggccgggtcgtcaggcggtcagaagcgttttgcggtccgtcaggatgagcgcgcgagagggcaagccgagaagagagggagttatgctaggcgtatcagcgtggcaagatcggcagatgtcgaccgcgtgtccggaggtcaggctggagggccgaggcggaggctgatcaggaggagacgagggtcagattattcgctgcgggagggcggcgaggtgggtgggcggccaggacgagtttttgtctggggtcagttcttgacaagggcggcagctgaaagagagcactggcggctgctgtgagcgcaaggttagcatcagagacgcacgggtcgtctgctcgcaagggccgaagcagcgccagcgagcgtctctagcagagagccgaggtgcgagcgggccgacaatgcatgaatggccggaggacgtggacgttccaagtcaagaggcgcatgctcccgccctggctgggctggctctggccttgctagaggagggtcggtcggggccgacgtcgattgtcaggactcgcgcagcaccggctgccgccttctgccctccgcccgcccgacgtgcaccctgcaagatggcccaacggacgaaccgcctgctgctcctcggcctcctgctcgccgccttcttcctctggcgcaaagactggctcttgccatcattgacgacagaggccgacatccaatcgcccgagtcacccgactcggccgccctcggccagcagcagcctcaagccgcaccaccggccgccctccctcctcctcccgaagcggtccaagtacctcggtcgcaccgccacccctttcttccctctcgttctctctaccgccggcaccctctcccccgcctctgtccccctcttcgaccactggcgcgccctcatgccgtcgtacggtctcttctcccgcctcctctccctctcacttctccgggcgcgtgctcgctttttcgccttctaagttgcgctcccttcctctgcttccgtctcctcccctcgtctaactctcaaactcctcgcctcccgtccatagacccgcctttgtcattgcatgcccgttacaccctctccgggttcggagctcgttcgccacaagggtacggtcggacccgtcggccaagcctcgccagccatggccagcacccgtggccggtgccctcgctgtcgcgtcgagtacgccgacctctgggatcatctggtcaaacgacacggggacatcaactggtccgccgccgacctcaggggcacgacccttctcgcctgcccttgcggcgccgtcgcccggtcagaccacggcctcaagtctcaccagggcaaggtccggtgcgtcggtcttcatcaacgacacgccagtacctccgctccggcccgtcccgtgccccgtcgagctccatcggtcgcctccgtagtcaccaccacgtccgccccagcttcggcccgaactccagctccgccccgggctccgtcaacaccagtccgtcggtcgtctgtctccgctgctgccgccaatccggagttcgagctgctgttgtccgaggacgagctcacgccggtccgtcgccctcgtcggtcatccgctcctccgacgccggccgactggtccttcagctcgtggtccgagtccgagcacggcgaccctgctccggtcctcgctcctgcttctctgacctcggcctgtcctccgacctccgagccttccgatgacgactcttcgacccctgtcgacgaccttctcgaccggttcatgtccctcgtcaagctgccgacggccgtcaagcccctcatcggctcacaagctcgcctctttgccgacgccgccgaacgcctggcctctgccttcgtcgccaagccctcggacgagacgctgttcgactttctttgcctgcccaaggtcggcctcgtccctggccttcgagccgacgtcgacctcaagcagcggctcgcagccttccctgttgtcacctggcccgagttgccgtccaacgccgacaggggtgtccgtcctcccgtcaccatctctgaggccgtcgccaagcaggtcacttccggtcgtctctcccgggccgctcgtctgctgtctggttcggccaaggtcgctcctctcacgtcggacgtctcagccgagctcaagcgcaagcaccctgctggacccgctcgcccctttgctgcaggcatcggcccgtctcctggcatggcgcccaaggcagacatcgttgacgaggtcttccggaagttcaagctcgacacggcgcctggcatctccggctggacgcagccgttgctctcggtcgctctccgtcggccggccgtggtctcgttcgtgtcggtgttggccggtctcgtcgctcaaggctcagcacccggtcaccggctcctgtgcgcctctcggttgacgcctctcatcaagtccgatggcggcattcggccgatcgctgtcggcgagcttctgttccgactggtggccaaggtcttgcttcgacactacttgaagcccgatatgcttctcccggtccagctcggtgtcgggtcaaagggcggcgtcgagccggtggtccgagcggtcgaacgggcgcttgcagacgacttgcccaagacctacacccaccttgtctcgctcgacttcaccaacgccttcaacaccgtcgaccggcgggagcttgcggcagggctgcgcgactttgctccggctctctatcgtgccggtcgctggatctacggctcgcccgctcagctcgccgtcaccggtggcgatggggcagtcgacgcgctcgagtcatcgcaaggggttcgacaaggcgacccgttcggcccgctcttcttctcggtcgccattcgccggactctggacgacctcgttcgacaccttggcccggaccgactgctactggcctacttggacgacatctacgttctctcgccggacgaccaggccttggctgaggttcaggacttcttcgacggtcgcggctcgtcccttcagcttaacgtcgccaagtccaagtcgcactcgctggccgacattcgcagctcagggctcgagctgctcggtacggccgtcggcggtccagcattcaggcggtccttcctccaagccaaggtcgaccatcaagtcggcttgcttcggtcactcggcgacctcaagtctcagcatgcgttgctgctgcttcggttctgcatccagcaggatcttcggcacctccagcgcacgcttcggacggacgatctgcccggtgtctgggacgacctcgatgcggcccttgtcgacgcagccctccttcttcggtcctcaccccgacgtctcgacaccgacgctgaccttgtcaccctacccgctcgtctcggtggcctaggggtcctgtcgcacgctgagtgcgctccgctcgccttcgcatccggctcggaggcggccgaccgggcgctcgctccagcccttctgctcgaggtcgacgacgacaaggcggtcgtcacccagcgggcccggtgcgacaaggccttcaacactcggctcgaacgtgtcctccgtcgacttcccggcctcgagcgcgacactgtctccgagtccggcacagtcctcggtcgacgttggctcggtgtcgtccccttccggtcggtgctcgagctgtcggacgccgaggtcgcctctggtcttcacttccggacgctctgtcccggctcgctcgacttctgcgccgactgtggcgacgcagctccgttcggtcacgacgaggcctgctctggtcgtgctccggtcgctcttggtcgccacgagcaggtcaagcggctcatcaacaacaccctctcctcaaacatcaagtttcgtgtttttctcgagcctcttgtccctggcactcagcttcgaaccgaccttcgcatcaccggtcccgatgatgtccgcgagatcgacgtcaccgtcgtctctctcgcctcgcaggacgctcggtcggcctctgcccgtgctcactcggacctctcgctctcgttcgccctccggtcccggaacgccgtcgacgacaccctcgccctggccgctcggagcaagaccctcaagtacgcaggccgggtctccgctcccttccgtcccttcgtcctctcgtccggcggcgcggtcgagacaggtaccctcaagctgcttcacgcctggcgcgaggttctcgccccgtcgtccttctcgcacctcactcgggtcctttctctcatcctcgtccgggctcgggcccggctcggtcgactctgatcatccggccttagcctcggtctggttcaggatgacggtcgctcgatcggtctagcctcttgcgctcttccgccgctcgtttcatctctcttttgtctcattggctcctctctcttccgcgtctgttccgctccgtcttccttcaccctccgcttccgtgtgcccgcttccctcttccgtagctctttctctcgcctctctcttccccctctcgacgacctccctccttcgtccaccctaccccctaggcagccgacccgaccctaccccgtccgtctctgtgcccgtcccgcctctccttgaccctgccttacactattcgatgctgcagtaaccctacaccaggcaatccgacccaacccctcccgccccactccccccaacaccctatctcgctcgagccagcagatcatcgacgacatgaccttctttgtgcccgtgcgcgagaagctcagtctaccgccatcgacaacttccgttgctactccaaaggacaataatcgccctcggtcgcccccgtcgagaatatcgaacaagtacttatcttccgaagagattcaggcgccgtcgaccggcgttcatggtgcgccggtgctgacatggtgaacgaagcaagaacctccagcttggaaactttcgtttcgattgtgttaacgtggttagaggctacgtgacgtttttgttgatttcaagaatttgtatgaaatacgcgatcctgtctttcagtagctggcttagccaagtggtctacggcgattgattagaaatcaattcctctttgagggcgcaggttcgaatcctgcagccagcttttttgcattttcctcagtaccttccccgcagctttgtctcgagcagtgacgacgacaagacctccgctgaaacgccctttcgccggaacaagcaccgcaaaggttgagcggggtaaggagcgaccgtcactcgtgagattcgctgtccgaaatgcttcgggctcgacttaccttataccaaccgagcatctgctcgtgctgcgcggcgccgcgcctagcggacgccgcctctcctcccggtaacgaaagcgcttcgcccgacgcctccttccctgccgtcctgaacgctaccgtcccgcgacaattgctgggccgtccttagactcctagttgccatcgatgacgaaccctttgcccatttgctgggcctgtacgaacaggttgcttgtgcaatgctcgtcttcgtcgctctggcaagaccttggagagagtaataagtcagcggcaccagcatggtgactctcaccgagactaaggcgtgacatctgctcctcctcgtccgcaagtagggaagggaggggcgggaccagcgcatacgcatccccataacttcctggaaactgcacctgtgtgcatatggccggccacgacaccttgcaaacacgacccttcaagaaaattgcggcccacttccggcaaggatcgaccgccgtcaagtttgctgcgtgcaacacgacttcagacggctttgccgtgatctgacgctgaaacatcccgcagtatgcaaaaggcccgcgcagagcatcaagcgcgagatgcaaaagcttctcgactgcctggctctggtcgggtcgtatggggtcagattcgatgcgagtcttcgtttatacgtgccccagcttgcaagcttttcgcttgcacgaacaatgctaagctatcgacatggcagcttgaaggctaagcaccccagtagatacaacacctttggctcagggtcctcttttggtcagttgtgtatgcgggtaacaagggcatgtccgacacgcgcgcgacgttggcggtcaaagtcgccgactggcgggttcgcaggagggccgcaatcgagaggatcaaatttgatcctaacgacgagtcgcatctcgattttggctttgacgacgaaaattttgtccacgagtaccgggctacagtactccaagcactcggacaacgtcgatttcatagtcaacgacatggatgagaggacgaagaggactacgatgcagaggagtcgacagtggacggcgcgaaaatcggccccgcaagctccccgtccaatggacccagcgcttccgtacacgtcgctgaggagaaggataaaatcattatagttaaacagattcacattgttgaagatcgagtgcggcgactgaggcgagagatgagcaacgcgtcgctgtgggcctttgtcttgaccggcatggcagcggatctaagaaggatccagcgccgtcggcattaacctctgcaaaggctgacgaaagaccggtgaccggtccgtcgggagcatcgagccgcttgacatgtgggacggcgctctcgaggaccgaccttgctcatcggcgccctccaccttggtaacttacctttcgaatcggatgtttcgggcgcaggcttgatcagtgaccgaggcggaccagggacgaagtttctcttgtgctcagcttgtctcggcacactcccgaggggcacaaatctctgtgagaatcacagccgtagccatagcttcaagctccagcagcagcagtgatctgtcagtcatttttattccagactccaggccggcaggctggaccgtcatagtggatgaagttgtcataatcagcacgacgtccgagctaagctgcggacgcccggaggatcgtatcggcagggcaagcgatctcaagtctcgagagcaatgttcgactggtgtactagctggacttcgcgaccaggtcggtcggcggtgtcgaacgaaactcgcccgcgccgtgcaggcgtaggccggcgtgcaaaagatcattactgcttcagatttagctggttgctgtcccggacctcctgtctttcagccttcagtgccgtagtgtatagcgcgaaggaggccagtccctgcaaggtgctcgcccgcaaaaaaaatcgaccctattgatcgactcaggctcagtcctcactcttgcccgaaatggctcttagcctgcacctggttcttctctctcgtacatcaaacattcagccgactgcactgcctctccctgaaatgcgtgaacgtcccggttctggcgggcgactttggctcgatccgcttgccggccgagaagccgaccagatgcatgctgcaccacatacccctagacgctgcttggcccagcgcggcctcaagcgccaaccatctccgtcggatttcggtcctcgactaagggggtcggcctagacacgacagagacagggggttccagacaagcctgcgcaaagtggtcggcggtacctcctcaccaggagcgtatatgccctcgatctgacgagggctcagaaggcctatcaactaagggcagtcagcccttcataaataacatgaatatcttattcctttctcgtccctattttgccgacgcactgcacaggccgcctacgcgccgcgggtcgagcgacgctcgcacgcgcccatccctcctcctgctcgtccatctctctctcagcagcatgagcaagtccaacgccagacggcggccgtccagaagccgccggcaatgctgctctggcccctgcccgcctgcaacggtcaaaaattgaggaactgaaagaccttaggcatccgttgcgggaatgttgaaggcgttgctgcgctggcgccggccgggcagcgcggaaacctgagcgccacgtccagagtccgccggactttttcctcctctctcttttcgctccctcctcttagctagacgcccactcgctccctctcctatatctcagtcgttcacggagtagtcctgagactgaggtacgttcgccccccctagtctagcccccctttagcctaggcagtagctcacccccactgtagtcggacctgcctcctgtctcgtcctacaggttatgagctcatccatcgcatcatccgactcagacgactctcgacaagagatcctgtcgaccacccccgaactgctgccgtttgccccgtcgcccgaaccgccatccgcgtcgcccgcttcagaagcctctgccgacgaccccagagcccctgcccgaaccaactctaaacaaaagctcgcgatgcccgtcggcgatgaaccgacctatggcacctccgccccaacctcgaccacctttaagattcccgtcttcaacggacgggacgacgtcttccagcaatggaagctccgcatcctcagcccgtcgccgcccgtcgcagcgacttcttcccgaccgtcctgtcgttcctccgccagctgcctatcatcggcaccctgctctcgctgccctacatccgcggcgtgcgtcctctgcgcccgctctcgcgacccgccttccctcggctgaccagcccctcgcgtcgcctttcttcgactcgcagtttgcggaccgactggctgggactactttaaggaggagggcctgagccatcaataacgagcgatgcccttgcttgcttccccgcgcgccaaggaagttaggaggtcttctaaaaggcatagagcgtccaagtgtctcttggaatcgaggcgagaggggaggatactttacttgatagagggacgggggcgtgaggcggcaaacgagcggcaggcgaaagaaggcagaagagagagggtcgggtgagctacagggtggagatggtggtgggcaggaagcgaacagcgaggtgcgagtgaacagagtgggaaggaagggggcaggcaggagtcgaggaggggacgaatgtcaatgagcggaagcgcggtcgtgtgcaggagtcgaggaggcgaaagagacgagagatgctagagagccgagaggccgaggagggagagcgagagggcgccgatggcccagccgaccgatcgagcttggtcagccgcggaggagccgccgctgccgccagcggcggtcccgctgccgctgccggccgtctcctttgcgccgttcgagttcgaggcggtcgccgacgacgagtcgggcgggttggcccacatgctctttggcatcgagctcgccgggaggaccggcgagggctcaaccttctgctcctcgatcctgcccgagccggccatgatccacgtcgcgttcgaggggacgccgttgacgacgcagaagaggagggccgggccgggcgcgaggacgctagcgctgggcagctgcgagacgtggaaaactgccgagccgtcgtcggcgacggtaaacgtgtggtcgagctcgacgtggcgcatgcccatgttcatggcgtgcgtcgagaagccagtgcgctcgacgacgaacatcgtagcgttgatgtcggagctctgaccaaaggctgaggccgggagcgagacgttgaagtaggacccgccgtacgacagcgtcttgggcatcccgaccggctcgggcttggtcttgccccagtagtcggggtaaaactgcgagagggtgttaggcgcggtcagcgtcgagctaggtctgggggacaaagcaaaaaacgcacgatctcgacacggtattcggtgacgtaggtgatcgaagggtcgatgctctggtcgacgtctgcacggtgagggcatcagggtcagccgtgcgtcaagttggcgcatcagagagatcggcagacgcacagtcggggttggggtttgagcccgagacgaggacgctgccgtccgggaggagcgtcgccgacgagtggtagagccggtcgaccgagctgacgccggccttggaccagcgcgagcccgacggctggcgtgggtcaaagtaccacgactggtggttcggctggtcggcgtacgaccgtccgatggcccctgacgagtgcgagccaagggcgtcagcgtgaggcaggcgcatggtgaagcgagcgggaggcggcgcagacgcacaagactcgttgccgtagccggccgtgccgagcgcggcgccgttgcccatccagagccggccgtcggggagcgagatgaactggcccatagtccggccagagtcgagcgcatcctcgtcctcccagtcaacgctgacgtcgggcgtcatctgagcaaggcgagggcgaggcggtcgtcagtgagcgaaaacctaaagcgggaagaggcgcgtgcgaagacagaccttgacgcatgtatcgtcggccgggtagccggcaatgttccaggtcgtcgtccactggtcggccttgaggtcggtcccgccgcaaaagaggagggtcgctgtccagttgttggccggcgtcaggggcagcatcgccgtcgcgcccgaggccgggtacgtccggaccgcgttcgggatgtcgtcgagcttgtactcgatgttgttgacgaagtcgaagatctcggtcgcccagttggtctggatgaagaggttgccgctcgggaggagccacgtcaggctgaagagattggccgggagcgagttgagcaggacgttcatcgtcactggcttgccatcgcccttcggcgggtagaactcatacgtcgggttgttttggttggcgccgttgacgtagccgccccactcgcagccgccgatctgtacgagagacgaagggtcagcagtgcgacgcgtgaagagggagcaagggcgcaaacgtacgatgatggccgagccgtcggggagcgtttcgagcgtcggataccaacgccgggtcgtcatgtacatgttggggtcgtcgatccactggcaatcgtcgtcatcgtcgcacgggtcgagaaacctgccaatcctacgagtcagagccaaaagcaaaagcgaggatcaacagtgtcgggcaggcacgcacctgatggccttgccgccgtcatagtcgtcgtagggcgcaccgccagtctggctcgcggccgtcagcccgccccaggtgatggcctggttgccgccgactgccagcggagagagatcgcgcgcagcgtcagccccagcacacccggcctagcacagagaacgagaaggaccgaaccattgagccacgtgccgttcccaagcgggatcccgccggcgcaaaagctgttgctgacgacgtccatcgcccggacctcgttcgtccggaggtcgtactctgagccccaggcggcgtgctcggtcccgccgacggcgggcgtcacccggagcgggttgttttcagtcttgtcgacgacgtagaccttgttgggcgagccaaggaagagctgcgggcgaggggcattcgaggaggcacgggtgagggaagaaggcgattggcgcggaggaggcaggtgggtcggtcggtcggtcgcgtcagctgcgagctctccagaagcaaagagaggatcggcgacgcgttctcggaagatagaagaccgggccgctcgagatggggtgaccagagctgactgaacagaaacggacggcgctcggcagcgaccgagagaaggaaaggagggggcccgaccaccggctccgtccggaaaaagacacgcccgaagggatgggctgagaaggggtgaccgcctctgctgcagccgacctggacgcggaggaagaaaggtctgcggcgttgcgcgtcgctcgagcgcttgcccttcttccctttgcgagggccgggtgcctcggaggagtaggggagcgagcgcgcgccgcttgctggtgctttggcgaagacgcgcgcgtccccggcgcgcagagtgcaacagcaggagcgccctcccgcagctcgcacaaagccacgccacccagcgcaaaaagaagaggaggagcgaccggtggagaagagagaaacgacggacctgctgggcgctgacgcccgagttgccgacaattttgaacgagccaggcgtgccgtcggcggcgagggtgcccgaagccgaagcgagcagggcggcggccgccgccgtcgttgcggacaatagccggcgcgaggacgacgacgacgacgacgaggaaggatgcgagcgggaggtcgacatgactggcttgcgctaggaaagccgggagacctgtcgacgagcggaggaagaggccggcgttgtagggccaggaggggaaggggtcggaagaaagggcaggggcgcaccgccgcggaagctgcgtcgctgcgggacgacgagggggagcccctgcagctgctgccctcgaccaacgacgccgacctcgagaggcacccttttctctcatacatcgccctcaggatggactgtacgcgcttgtcgtcagaaagggggtgccattcgtttcatcaggaggagtcggcgtcggtttgcggttcgccaacgctgggtggtggtacagggctgcagtacggcggggtgaagagcgcgtcgtcagttcaggacgttgaccgggcgagacagacgaaagaagtgcacgcacagagaaggagaagctcttgccctcaggcgatgatcccccgcccgccggccttccaaagcgggggtgtcgggtaagcgagcgactcgagcgccgccgggcccggcgtccgagcctcttcttccgtcgcgctctcacgcgagctcaagcggtcgtcgtcggcaggtagaagcccgtcgtcggcgtcgtcatcttcgtcctcgcgctcgtcggaatgtccaagctcgtcgtcgtcgtggtcgctgtcgggccgctcatagtccgggtcgatcgggaggatgatcggcggatgatcgccgccgccgccgccgtcgtgctcgtcgtcgtcgtcgtccgagaagcgcgagctggccaacgacgacgtccgagatgagccgctcgagacggagtgggccgaggacgagcgccggcgccggcgactcatccggctgctccctccatcttcgccgacgccgctgatccggtcatcatcggccgggtcatcgtcgtcgtcggcgccgtggctgcggaacgaaaacgagacggaccgggcgacgctgccggcttttgtgagcccgtcgacgtcgacggcgaggattgacccctgccggtaggagggcgtgccgtcgccgccggctggaccgccagcaatcgacgagccgccgccgccgccgccgccccaggcagggccgccccagaggccaatcgtcgagtcgcgctcgccgcctggccggacatagctcccgcggccgaggatggacgccgatgaaggggccgcagcagaccagcgcgactcgcccgattcccacgagcctttgcggcggatcgcgcggacagaggcgccagcgtcgtcgacctgccggaggccagcgctgggcgtccctccccctccgccgggcacgtaaccagggccggtaaaggagaagctgatgctctcggcgcgctcgaccccccggcggatcgaggccgagacgatcgagggtgcgtagcctgcacggccgccggtcgtccggattgagccagccccgccgccgccgccgttaacgagcgaggtgccggtcgggccaaagaaggacgacgacgcgagtgttaggagcgaggcattgtcgtttggcggcgcagacgggtgcgggttgttgcggacgtgaggggtcgaatgcgtcggcgcgtaagggtgctgggcgtggagcggcgagagcgaagagaaggagctcgagggcgcgagcgggtcaaactcggtcgccggtacctgcgaggagggatcaccgatcgctcgcgggccggccatgggcgagccgagcatgggaggaggcggcatgaggacgaccggcgggtcgagcccgcttgatgccaggccgttcgaaaagtcagccgctggccgagcggcggcggccggtccggcgagggcagaggttgcgagcgcgtgcgaaagaagtgaggttggccggaccgtcgcttgccaaggcccatcgcgctgactagaggcgagcggcatcggccggaggacgggtggagacgaggcgacggacccccagcgcgagagaccagccccgctgcctgcgccgctcgacgaagccggaggcgacgatggcgcgcgaggtcgggcgcctccaagcgactgagcgagcggactcgacgggtgcgtcgtcggcgagagcggcggggggtgttgctcgtgcaagggcgagaaggtcccggacgtccacgactcgcgccggttgtgagtccgaagcgggcttgccgtcgtcgggctgcttgcaagagcgacattcggaacaattggcggtatagcactcggtgtcgacgtcggcgagacgttgtcgactgcaggcggctgggcgatatgcgccatcggcccttggataacgatgctctctgcccggccggtcgaggtcgacgcaccatccacagacgtgacggccgtcgtaggtgtcgccacactgctgctcactgtccccacgctccgccaaccgcggctcgaggccgcgagcgaggccgcgtacgagggcgagcgcgaggacgcgaccgagggcgcgatggtccgcgcgacgctgtttgaggggctaggcgagggcgggatcgagggtggcattggtcgaagcgaggccccttcgttatcgtcgtcgtcgacgtcgtggacgttgaaggctgcagccgagtcggcgtcgtcgccgccgtctttggcgccaagctccgaggcgacgtcgctgtcgcgcaggtggacgtcaggcgtgtgatcgcgcgagcggaagcccggatgagcctcggaccgcgcccggcctcgctgatagggtatgtggctgctaggtgggccgccaggacggagcgagaccgaggcggtcatcgagtagtcgtcgagcgtcgacgaggacgagctcgcggtgaaggagctcggcgtccagcgcgaggacgagatggactggtgacgcgtgctcagccggtgatggagtgagggcggaaaggggtcgagcgaggtcgcgaccgaccgatagtcgacgccgtcgtcctcctcctcgtcctgagcgtcgcgctcggcctgctcgcggtggtcgcgcgcagcaagcgacgaggcgcggtcgccctccgagagctcgctcagggtccggcgaaggcgcgtgccgctgctgccggcctggaggtaacgcaggccgttgttggcgacgagccggccatagtcgctttgggcattgaccgagtcaaactcggcggccgctgtctggggcggggctgccggtcgggaaggctgccggccggcgccggcgccagccgctgctacctcccctgcaccgccagtccaggacgtcgagcgacgggcctggaggcgccgaaccgactgtggacgaacattcgaggagccctgaccggcgaaacctggagctcctccggcggcagccgtgcccattgacttgcgtagcttccgggtgaaccagccgaggaacggctttgaggccttcttggcgaggctgcccgtcgtcgaggcgttcgcggtgaggtgaccatgaccggctcctccggaatggctcgcagatgacgctgctgctgagtgggcaggaaatcggaggctggagaagcgagacgacgcgtgctgctgctgctgctggccgagggggtccgtggacggcgctggcgacggcgagttaatggcaatctgaggggaagggggcggctggacgtaggagagggtaggtggcagaggcgagagcggcgtgccgacctgcgagagcgggtcgggtgtccgtgcgaacgagtgcatgcgaggttggggttgagggaggcgtagggcggctacagcgcgagcaagggtaggggacaggggagatcagctcgaggcctggccgccgtcgaggaaggtgccttctctcacgcgattcactcgcaatcaaggaaactgaccttgacagctctctcaaccttgcgctgccatggtcgtcgtgctgcgagttgaaagtcgtcggtcgctcctgggctgtgctcgtcgttcgagggccgacgggaaggggggagagggggggaggcaagcgagcggaacggaccttgagcatcgcgccgaggtcgttgcccgggaccgacgcgatcgcctcctttgtccccatccgcccgccaacctgcctcaagatcggcagcgcgctcttgaacagatccagcgccgggtcgagctgcctgccgatcccctcgagcagcaggatgctcaggatcgtattgacgaaatcgccctccatcttgacgtggctcgcctggacgcccttgagcacctcggtcaggacgtccgagatgcgcacggccgagagcgtaaaggcggtcgctttgaccgagaggacaatgtgctggatcttgagggcaaagtgctcgggctcgatgacgagctcgggcgtccggcagcgctcgaccatgagcttaccagcccggtagccgtcgaattcagcgatcgcctggaagctgcgggcgataggtgtatgtggggggggggggcggtcagctcacgcctggagtgacaggctcttacgacgagtgtcgacgcacaggtcgaggaagttgcgtcggttcgtctcgtccagacacgtcacgagccccgcgtcgataaaaaccaactctggccgataacccttctcgtacagctcgccgagcgtcccgagccacgcctgtttgtcgtgcttgacggcgaggaggcgggcgacgacgtcatcggactcttcggccgcttcgggcgaggaggacgacggggaggaggaggagaggttgtggaggaggtagtcgtaggccgacttgaggagcgtgcgcgtcgtcgggcggtagaacttgacctacggacggaaaggggagggggggcgtcagctgggggttgacgcgcgttggagagaagacttcagggcggaccatgatattgcccgggtgcaggtcgccgtctgaagaagggagggaagggagggaagaggcgggaagacgccggtcagtcaattctcgcccttgtcgcgagagcgcgcaagccgacccacgcgtaaagttgtcaagcaggagcatcttctgcaagggcgtgcaacgcaagggagggcaggtcgtcagtccccttgtgcaaaaataaagagagagagagaccgcggaggaaggagagggaggggacggacgaggaacgcatcgagccccatgttagccagctgcgggtcgtacgccgccccgccgttcctcagaaaccactttagcggacagcccttttcaaactcttcgacgagcagatcgcgcgtcccaaagttgggcaccggcctcgggaaagagacggccgcgcctcgccggtgagcaaagttggcctcgaagcgggtcaggttggccgattcgatccggaggtcgagctgctggttcatcatttcgccaaagacgccgacttcctccgggagcgagagccagaccatcccggggaggaggttgagcgtcgccgcgaagaagtgcatgattttgaggtcgcgcgcgaccgtcaggtggacgtttgggtggaggaccttgagcgcgacggccgtcgtcggtacctcggtctggcggggcggctcgccgccggtcggggagggctcggcatgggccttcggcgcagtgtattccggagggaggatgtcggccttcagcacgcccttgtagacctgcgcaatcgcaccgcatccaatcggctccttctcgaacgactcgaatacatcgtcgaacggccggtcgaacgcccgctcaacgacgcgcttcgtgtgggcgaagctgtggggcttgccgttcgagtggagctggccgaattgggcgcagagtgccggcgggaagaggtcggttcgtgagccggcccattgagcgagctgcgtccacgaggcgaaaggggggcgtccgtcagttgagaagccgcgagggcaaaggggaggcgtcgtcgaggcgaaccttgatgaaggacggtccggcagcctgcatcgctccgaccaaaagcttgtaccaccaaaccgccaacttccgctcgcctcgactcccatccttgcctcgctcgcgcgggccgacgagaacgatcgggctcaggacgagcacggggaggaagagtccgacgaggtggaggaagcggagggcggtcaatagcggctcgaggaggtagacgttgagcgggtcgaggagggtccgttggaggagggagcgtggtgcggagggcgaggaggggagggtggaggagggcgggttgaagaagggcgaggcggacggaggcgaggcttcgggcggcggaggccgggaaaggaggtaggcgccggaagagaggccgacaaaggcgagtccgaggctgggcacgacccagctccgcgctgatggcggcgggcgaggtgcgcccgaggaggagggccgcgatggctcgctcgtcgctgttgctgaggcccgggaggaggtcgaggacggcgagaggacgaccggagccgatcctcccggagagacgctcgcgaacgcccgtcgaggtccgagcgcagggagcggtgaagagcgggcgttggttgttaccgcgactgatgacgaaccagggcgggccgtcctgttgctgctgctgctgttcccgcctgccgaggctaggtgggaagacggccgtccgcgaacgacggcagcagcggaggcggtcgatcggctgaccgacgcaaacaaccttcgaccgctgctgctgctgctgccataaatcgtcgtgcctggcctgtgagtgagagccgaagcgaggaggcttgaggcccggccgagtggaggagcggcggccatcgagagggaagacgatgagggttaagggagagaggaccgaccaagtgggcggtgacgcgttcttgaatggctggcacgagacaatcgaccctgatttctcctcttgcacttgacccggggtagagggtagaccgatatcctacagcagtcacctttgctagatagtccttctaccgatgctgctccttggcctgtcgttgttgctgctgctgctgctgctgctgtcgcccgtccttgtccttcgccctgcgcgcggccctgcttgctccgccggctgcgcgcgcctctcctcccgaccccctttcacaccgcctcccatgcctcctcacatcagccgccctcggtccaatgccgcactcacaggagcagcagcagccggtcccggaccagcgctcgtccggaagctcctctttcctgagctgggggagcgagaggaagtgccggtgctgttcgcgaaggaaaggcggaggggcgagctcggcaagcggccggctagggcgtctacagtagtcgaggacgacgaccgggaagacaaggggaaggaggacgagcacgagcggctcctcgcagagcttgacagcgagtcagtctgccctccttgtccagctccggctagccgagcgctgatgtcgacagtcgaagatggctcgctgacctcctttcgccgcctgctcgctcgctcgctcgcatcgcatcgcatcgcaggacgtacctcctactcgccctcgtcctgagggcttacgtcgtccgtcctttcgccccctctcctctcatctccgaccctgacccctccttctctccgccggccggacgcgctcgccagaacgtctggttccgccccctctccccacgcacgacatcccttctcccctcgctcgcccagactctcatcctcgctctccgtgagggccaggggcgagtgagcgtgcggaaagtgggcgagtgggtcaggagggacgttccagagctgttgggcgggcatgtcagggcttggaggccctagagaagcgattaggtcagtgtcggtccaaactgctcttgtcatggcgaaatgagacggcggcaacaaggacgacggcccaccgactgtaaggtcgagagcagtccgcccacccgcccgttcggggtcgtcccagagcccgaaaggcgctcaacatcgacgccggccgagcagtgcaatgcagagcagagctgcagtttcggcgagccagcagcccgggattcggaggcgcacgggccgagacagttcctcgacagagagcgagagagccaacaagggcgggcgggggaagggtcggcgggacgaggtcggtcggcatccgctcgcttgacgtcctgccgctctctctcgccgacgacgccgacgacgagctacgagttgcgcccattacgtgcatctccctcctgtcagcgcaggagcgcccgcccgaactcccaaccgagctcccgaccgacacggccccgaccctgacacccttcgagcaagccgacggcgaacgtacttgagaggcttgagctttccacctgtgacgcgcggacgagtcagcaacggcccagcagcccgggacatagcaatcttgaggactgaccctggcgaccggacatcgtctctgataagttgctagagaagaagggagggaggaggcggtcgttggtacaggtcgacagggcgggaggcggcgtagtccgagctcaacctcttagatgattccgacgcgcctggcgataaatcatctaattctcgcgcggcgcatgcgcacgcgggcgatctcgctcctccttgcttgcctcccttcctccgacttgccatagccagctcagccaggatggcaccgaccgacagcagcagcagcaggtcggccttgacgacccgccaacacactcggaaaccttacgccaggccgaccgcaccgcacgcgacgacctcggcggcagcgagcgagacgcgctcgagagggtcgacggcgtcccgccgccagcagcagcaggccgacgacgacgcttctgctagatggcagacgaacggcaagaccgccagcagctctggaggaggaggctttggaagcggcctctcgcgcttcctcgccgcgccgcttgggtggatcggcctcggctcgagctcaaagcagcagcagcggcagcctccagcctctcgctcggctcggcagcccgcgcttcccgaggcggatgaggaggaggaggaggaggaggaggaggaggagggcgatatgaacgatgacgagaacgacatcgagtcgcacaagcctcctcctccgccgccgccgtcgagccgcctccagccgtccgacgccgctcgacgttatgcgcccgcgagcgcgagcagcgccgccggcgagaggtactacaacgacccgccgccttcttccttcctcgcccctaccggcggcagctcaaacttcgcacgccgatttccctccccagcaacgagcggtctcccgctctcgtcctctaccacaaatcgcttccccttccgcgcgagcgcaagccctgcgcccgtcccgagtctgatgcgccggagcgagacgaccctcggcttcccgtcgtcgctccgcaactcgagctcgggctcggctgcagggtccggggcgtggcaggaccgctatgctcggagggtcgaccatggcgggcttggaggaggcgggggcgggatgacgatcgaacgcggaccggtgcttgtgcgtcacgtttcccccttctttctcttgctgcggcctgcctcgcatatgcacaatctatcaacgtcaaaagacggcgccgcacgacgtcttgaagctaacctcacccacacgcacgcacgtacgcagggccactccatccgacctttcccccgcgcccactcgatccaaaccttcccttcgaccgagcgtgccacccgcgccctctcggtcgactcgaatgattcagacgacgagcgtcccgtgcgaaagcgctcaaaagcgacgcccgtcgccctctctacggcggccggcaacggcttggccggttctggatcatttggatccgactacggccggagcttgcgtgcgggttcggggcctcggggccagatggtctggtcctcgactgaaggattcctcagccagcggacggccgaatcgcgcttccaccagcagcagcgcgcgcagcagctcgagcagcagcaggcgagcgcgctcgcgcccaacgcggccgaacggatcctccagtcgctcgagtcgatgcgctcgccgctttcgaccgtcccgccgttcctcacctcgtctgtctcaactaccgctggaccaggccggctcggcaggtcgagctcgatgggccaaattcacattcccacggcgacggccggcaactcggcagctgcgatgcgcgccctccctctctcagccacgatcacagccggcaggaaatcctcgtccgccaccgccagcaacgggtcgggagcgacctcgccgatgatctcgccgtacggccgcgaacgggcccaccggctgcggctggacgagtctcggcgcggggcgagctcgggcctgcgcagtctgctcgacggaggtgcgagtcggagccggcggcgggcagaggcggaagaggacgaggtggaggttgaggggcgggacgagagcgagatgaacgacgaggatgaggaggaggaggaggaggaggaggaggaggaggcgcaggaggctgaacgtcgtgcgcgtgaggaacaaggtctgtcttggctcgcttggctgctgctcttgcggtctagtcgctgacgctgactgattctggcttgctgccgcggtggcagagcgcgaagaccggcatcgccgtcggctccggcgcgaggagaagcagcgtgcgcgccgggaggcctccgagggagaggccgagccgtcgtccttgaagacgaaggtggccaaagctgcgcccgaagaggctcggcctgcgcgcccttcgtcatcgaacgccgctcgcaaaccctcgcggagtcctctgccccctcctccccctccttcctcttcgtcaagcaagccagcgaagcccgctcatcaagcagcgccgcctttgaccttcgccgcccttcccgcatcttcggaactcgacctcggcgcccctctcccaacagacgactcctcctttcaagcgatcgccgcctcctcctcgtcagccgccgcagcgcgctcgtccctccgcgcacgctcgagcgcgacaaagagacagcacgtgcctgccgcgggcgggtcgaggggctcgacgcctggtctcggcagtgggagtgggagattcagcgcgagggaggaggactacgagagcgccggcggcgttaactcgaaggaagagtcggcgaatgcggctcctgagggcgctgctgctgagaagaagacggtcggcccgctcgacttctttgccgcacctgctccggccaagccggcgccgacaaagaacggcgccaaggcgtttacgtttggcgagggctcgatcttgcctcccgccgcgacgccgaccaagacggcgtcctcgggtctctcgttcggcgcagcagagtcgacgacgcccgccggcccgccgcctgctacgtcgcttgctaatggcagcgccgaccagagcagcagcagcggaggaagcagcaagccgccggcattcttcgcctcggcgcttgcttccaccacggcggccgcgcctaagccgccggcgttcggcttcggtctgcctccctccacgtcgtcctcttcaactcccgccgcttcccctgcccccgagcagggacgggaagcaagacgagatggtgggcgttgcagggcagcgagctcgtccctccgagacgcgtcctcgcgctgtctttccctgtctttcctcctgaccatcatcctcagctcgcctccgacgtaccgggctgctctcatagggcctgcaggctgcgcttgactgatgttgctcaccggccctagttgcgagcaactgccagagcctcagcgaccacgcgctcgccggaccagcgtcatctgggtcggccggacgcccgtcccatttgcggccctggcaccgatcgtcgactacgccaaatgtctgacgctgcagctctttggaccggcacgatgactcacatactagcgactccctgagatctcgccctcacaacccttgcacggccgatgtcaaccttcgcgccgcgcagcagctcaacgcacaaagggacgccttaaccttggctctcgagacagccgtcgccggtttgaaggacgagcagccggctcaagaccacatcgaggcagctcctgatcaagcggtagtggtcgatcggcccgaacggcgggtcaattacctcaagcagagcaacaagggtctgccgaggcttcgcgttcgctcaacgccttcgctgaccctcacatatgcgctcagtaacaagccgagagggtactgacaggatgccctgtttcttcggtctaacagcttcggacggacgatgacaggtgcgggcccagtcagaagcggcgctggatctcgtctacgcctgtacgcgtacctggccccgctcttgccgacacatcatctaggtcaagcgctttggcgatgcttcgtccgtcgactgcgagggctcgacggcgactcgccgcaaggcaccagagacttcgctacctttaagaagcggccgaccgcctgtacgacgaccgaaagcggcaagctagctttcacattgagcgtcaaaggcgcggttccgtcttcgcatcttcgacgttcgctcggccggcaacattccgcgctaagcaagaaatttcgaagacgaacaaggcgtcgaccgacctcgttctgcagcagcgagcttcctggctgctgtcgtctgggagtcgtaacgtttgattcggactatcggtgctcgcccttgtgcagcgccgcgctgctcaatcttttctcaagcacgatagcgtcctggacgagaaggctgcctggcatctagaagtcaccgtgtctgcctcgggtagacgcggggcagtctgtcgccagacgctcgtcgacagggtggcttgccggtcgcccatcaccgccgccgcttcgaaccgtacgtcaagtggtacgcattcgcacgtagatggcgcctgactgagctgctctcacggcgggctatcgtctctcgcaggaacccttcattcagacgtcgtccgccaacaagcccggttggggggcgccctcacaacaatggcctccctacttccagacggacggcgcagggcccatcctggcattgtgcgtcggatgtcgttgcggctgacttgattggccgtacctcttttatctgactctatctcagaaggcgcaccttctgctgacaacatgccagacgtgcgctcagctttgatcacccgctcgcagacggaagtcgtcgcgctcgagcgtgttcgtctcatctcgatccccgcaccgctcattaaacccaatgactacctgacgtcagatggaggtgtcccgccgactaaaggagcaggcctcaaccgtctacatctctgcgatcctgcgcatcggccgggtgtcggtctctcggcgctcgattcgcccgggccctaggccatccgcgcgtccaggcttgccgcaggcctctcttctgtctacatcgctgacgcacgactatcgtgacaccgtattacggcagtctgacttgacctcgccaggctcttacacgccccttctacaggcccgtcatggaggccgtctctcacacggcctgcgcgacccgaccatttcttgaatgcaccctgcgcctgccctcctctgcgcccacgacacgtgccccgtcaagcctgtctactgacgattcgagcattcgcttcctccgacctgctgatcgccctcgcgtgctcgccccgttactctgacactcgttccgctccgctgaagcgctcggtcgaccggcggcagtgcgaccgcaaccctgacaaagagtgattctttggcgaaaccggaacttcacggctttgtgtatcagaagagtagtcagcgtcggcgaatgcagcgccatgctatcgcactctaacgacttccgaagcagggcgccctgtgcccgacgcccggtacgtaccgctgctcggcaggaccctgtacagcgcgcccctcccctctgttctcggccgagctctcttcgttgcaagcttagctcgacgacagctgctacccgcctgtcacacgacctcagtctaggtgcatattgtctagatattgtctagtggtagagccttcctcccccccgcggtcaatattaaccagggccggtttcgaccatgcgcaagtcggaggtatttcgcgtaatcataatccagctcctttacgaccggagtcgaaccaatcgaacgcacgcgcgcagagcgcaagcgcaggcttcgccaccgggcgcggccggggtcgtctcttgtcgaaatcgccccggtcctctggcccgacccctcgtctcgaccacactccttcaagcaggtacgtatccttggccatccctagcccggcaggcagccaggcaggcagcacacacggatcggtagcacacagttcggtcgcttcgacaactacggctcggcgtcctactcggccttaggccagacagggcgtgcctcgccaaggacacgggcagccgctgccagctgcacaaggctccgagggagcacggccttggaggggcagggagctgcagcgcatagcgtgatccgctagagctggtctgtcgtccaggccggcacgacgcttgctcttggggcaggatgggagcggggcctgctgccgaccggtcgaaccagctcgagcagctcttgctcaggtagcaggcacccagcgagctaccaagccagcccagcaacctcgacccgacccgactgactcgccatgccgaccgatcgacttgtgctgcccgagcgctgccgaccgctggttgctgcctgcccagccgccgccttgggcgtctgctccgtctcccgacaccgcctctgacctcgccgcacgcctcccagttctccaaagatgcctcactcgttcggttaccgcgcgcgcacgcgccacatgttccgccgggacttccggagtgcgtcgtcctacttgtcggcgtctggccgaggatctgtcggctgacccgctgccccgcctgcgctcgtcgccgctttcagagaagggcacaatccctctttcgacgtacctgaccatctacaaggtcggagacatcgtcgacatcaaggccaactcggctgagcagaagggtatgccccacaaggtgcgtcgcctcgtcttggctttggatatgagcgagctcgcccactgacctcgtcctccttccgttagttctaccacggcaagaccggcgttgtctacaacgtctccccccggggcgttggagtcatctgctttaaggtcgttggcaaccgctacatggagaagcgcgtcaacctccgcgtcgagcacgtcaagcactcggcctgccggcaggagttccttgaccgggttaagcgcaacgccgccctcaagaaggaggccaccctccctcgggggcctcacctacgaaaagagcgttcgactcgcgcccgcggtcattagagttctgagagggttcttaatgggaaaagaagagggctagttcagcccaagcatctatcgggtcgtccccgctgcctgagctctcagcccgcttgcacaccttgaataattcagaactggagcgtaggagatgactgtcatctcgtatcagcccggccagctccgtgacggaattgcgagaaaaggatggaagaccgagcgtagagcagagtgaaccgcggtctcaccaggtggtaaacgagagccaaaaaggtcgcgaacgatgagagtgtgtactgccgcctgcttcggcgtgcgggtgggatgggggaagagggcggtcagcgcagctgatcgaaggagaaaagagacgatgatagcttgtcgaggcggccggcattgaagtataacctgaagccgactcgtgaggcatcgtagcgtctcagcggacgaagcgaagaagaaagagtgttaagaggaaggaagcgaatcgggttttcagaggtaaaagagcaaaagtaacatcttgccaagactggtttcgatccagtgacttatgggttatgagcccatcacgctaccactgcgtcacttggcagttgatgttggggagcgctttattgttcttatatttcaaatgatatgatgacggtgcccaaagcacgacgccaagttaagtacttatggaagcaggaggaagaatgacccagacgacaagatcaccgccttgggccccagaggaacgtctcaaagtctagccttctgtcgtgtagctttcgtggctcatcgcacttgtgtatatgccttggcagtaaccgtgccatctgtaggacatgtcaaacctgccatcgctgaccgctgtagacatggagcccacttggcctgccggtaggacatgcctgagcttgcggtcatgactcgagtgactggagggtaaggcgagcttcttcgagaaaacggtcgatgattggtaggggcagggcgtcgtcctgcgtgcgcacgcgagcagtctcttgtcaatcacgacggcagcaaagaagctcaaggctgcagcacaggactcagatgtcagggcgaagatgagtggtgaggggcaggtgaatgcgagtgggcggcgctcacactagcagctcgcttgagtcggtgatttcatgacgctgggccgcgcgatggtcgagcctctctcgttcgagccgcggccctcacctcctgtcccgccaacgcccacacctttcgccctctcagaccgccagctccctctcgctcgctggagacgctcacgagctagaaagcagtagatccctgcccccggttgccgtacgacccacgctgtccgagaacaccgccctccggcccagcgccgacaaccaccttcaacctcatccttcttcctcccttccctcgtcttcagccttgggagacctcgcagacctccgacaggtgagcttctgcttgcgcgatagtcgtgacgccagaatgcgacgacgactgacctggtcatgtctcttgctgcgaccccctccgttaaccgaagctcacctatcgccgccaccccccactttcctttctcactcggctgccagcccccgtcggccatgaacgggcttcaggcaccactgatcccagataggtcagccagctcgacgccaaagccgcctccgttaccgcccgcccgacttctgcaggagtcgagctcctccggcccttctcctttcgccttgccgtccgccaccccgctgggaccgtcgccacatggccgccagccgtcgaccgcctcgtccgacgacttcggcgactttgtggcgtctgatccgctcggcgctgcttcggctgcggttgacagcccgcgagacgatgcgccagccgatgacctgctccaattctcgcccgtccgggagcgcttcctcgacggtgctgcgcggcgagtcgaggagaagcgagagcacttgctcggacccctcgaagcgctcgacggtgttaaccggcctggcttctcaggccacgacaagggcttcgggggtgagcctcggcccgtccccggcagcgcgcgacggcgcctgtcgtccacgtcatccgccggcattcggtacgtcttccctcttggtcgctctggtagcgtcgcccactgcgctgacgcgctcaactcaacaggccgatcatgagcccgccccggcgtctctcgcacatcatggcttcgccggatcccgctccgcggccgcctcctcctcctctggcctctccgtcgactgtcagccacgccgccggcgtcatcccttcgctcctcaagaccaagtcgaagtggacatcgctgctctcctctcccacgacgtcgccaacgacgcctgcacccatcgctgaccctgactttgagtcgcacgtaacgcacacgacgccgtttcactcgcatctcggcgtcggcgggtcgtacgtgccgccctcgggtgcacccggcttccgaccggacgtcgctcctcgcgagggctcgcagtgggacgacctcgacgagaagggtatcgagctagtcggccggcgcgagacgaccgtcgacatcctctcgtcgggcgcggccgagatggtccgtcttccctctcttaccggggcccgttgtcagtcttaccggctaaccaggcctccttcacgagagcagctccgaccacatcttcccccacgccctcggctcgcatcgacatggacgttgctttactcgctcgaccagcacggatcatccctccagacgctttacagtcaaaacgagcgatgggatgccaggcacaagggcggcgcgtcaggcggtgtcatcctctgcgtcaaggactcggacggcggcgtctttggtggctggacgaacgagagtcagtccgggtcgtctcctgtcgccaccccgacgtctatagtgctgaccgcttgcttccctccgcttttctaagccttcaagatcaagcacagcagctactatggctccggcgagtggtgcgtcgcgctctggccctggcctttcgctctgaccagaccgacgctgatggctgcccgggtctttccttccgcccctcgcctcagcttcctttacaagttccaccccttccgctcggcggtccccctccctgcgagcgcaacagccataggcggcatcgaggtcttccgtccgacctttgccaattcgtacttcatcttgtcgacggccgatttcctctcgctcggcggaggcgacggcaagtacgggctttacgtcgaccgcgagctcatgcgcggcacaagcgcgcgctgcccttgctttgccaacgaggtcctctgcacctcggccgccggctcaggggagcggaccgagcgcttcgagattgtcggcgtcgaggtctggggcgtgggcgactgatcatggcatcattggcccgatggcgcagggcaggccgggtggcaggtgatgagggcaggccaggtccgagtcagagcttcttgaagaagagagtcagctcatcagtcatttcggaggggggagtcagccggcaggggacgcacctctccacgtaaaacttaggggaagaaaagaaagggagagaagaagcgatttacttcttggccgccgtgctcttgggccgcgagcggcgccacatgaggatgaagacaagggcaaagaaggcgaccgtgtagaggatggtgatgccctggagcccctcccccacccaccttccttccacgcacgtcgaagcgttctcaacaacgctcgtctgtgtctcgtccacttcatgcgctcgcacgcaccactcccctctcgagtcggacgctcgacattcctcatcctccgcttcgcgcgtacacgctctgcgctcgctagcgcgcgggacgccgtgcgtactcaaacgttctaggatgcgatgggctgcgctgcgctgcgttcttcctcggaccgactgcttggacagactgagaggctaggaaacgcaaggaagctgaagggagagcgcagcgctttcattgtagcaaaaaagcgaaagggccaggctctctcgtggaagagagggcggcggcctcgctcgtgcagacgtcaagcggcaagccgctgctcggcaccacgagagaaccgaccccctctctttgcccgacagcctagccaacggccaaggcggaagcgaagaggaccgctagcatcggccgccttgagcgagcttggatcgctcgagggcgagtgtgtgtcgcccgtgaggggagacttgggggaggcggttttgcgagctgttggcgaggtggaccggtcgggtttgggggtgtgcgtctcgtagcaggccgagttgggcgtcggatcgaaattgcaagtgtcacagctcgaaccttgaaagtgcgcgagggacgacccaagaagcgtgcgtcgtcgccgtccccgagcgtcccccttcccccaggttttactcaggcacgtcatgcggcttctcgacgcccttcgcgatccggtagtagacgacgctcgagtccttctggacgatagccgtgtagagcaccggcgggtcttgctcgccttcagtccgcgggacggtgggcgaggggagcgggaggttggcagagaggtaggctggcgagctgaagagggcgaggaaggtcgttttgaacctatcgtcaccccgaccgcgatgccggtcagcttctagcgtgcgttcgcgagcgggaaagggagggggacggaccagcgtggggagaggggcgcgttcaacgcaagagggacaatcacccgtggcctttcgcccgtcttgcgaacggcgagaaggtaggccgctggcagggccgccgctgggtccggctcgccgctgctggcgacgtctggcacgttgagatggtaaggggtgacggacgcccatttctgagctgagccagaagcgagcaagtgtggcttatgtcagcagcctgggctggaaggggagaagaggaggaggagagcgaccgacaatggactaggtcattgaagacgaggaagaggggcccgccctgggccggcgtcaggaagggctcgagcagcgggaactaggaggcggtggtcgagcggttagtcagtcggcggcggcgcggaggctctcggctagcgagtgactgtcgggcgggcgcaccgagggatgcgactgcatgatcggagttgaaggggagtagagagggtgagcttcaatcacgctcctgatgtttacggtcaatcacacgcctagccgtaattccgagggatgcgtcacccctcggtcggtcgatcggccactgcgcgtcgtcgattcatcgaaggcggcggcctcgggctcgccgcacaacctcgacacacccaccctcttccctcctctacttccgtctagatgcccgtcgtcgcaggcgacgacctcgatccgttcgccagcctgccgacgcccatcccgccgtcgacggcacccgcggcggctccggctgctgctgctgctgctgctgctgttgccgccgcgcatgccgccggctcatcgacctcggccgacgccgacggccaatcgtcgtcgtccttgtcgtcgtcggccgaggtccggcctcgagcaggccaaggtcatttggataacgctaccgccgggtctcctcgagtgcgagcgagtgaaacccagcagcacgacgaggccgactctgccctccctcactcgccctaccacctctttctcggctcgctcaacgccctcccgaaagccctcctcggctggccgctcgacacgtcaaagaccctccttcaaacgaccgaaccctcgcgttacccaccgccgttcaggacgctccgcgtgctgcaaacgacagtgggcgagcacgggctccgagggctgtacaagggtgttgggggcccggccgcaggctgggcatgcgtcgacgcgggcgtcctcggtgggctctggaaggcccgcgggtggctgtatgagcggggctggcgggaggcgcacgagggcggtgaggagcggctgacgatcggcggacatgtgctcgcgggcggcatggctggactcatggtgtgcgttccctggtaccgtccgacaccgcttgagttgagcgctgtctttgctgactcctactaccgctctcctcagtgtgccgctcgcccatccgatcgatctcgtcaagagtacgtctgccctgcgacccctcacccctgtagcttgtctctgaccctttttccccttgtcgcttgcaggccggcttcagttcgctctccgcttgccagccgcggctccttcaccggcctcctccaccgccccggcctcgcgctcccggccctcaatcacctcgtcggccgcccgctcgcgccggatcgcctaccccaacccacgctactaccagcacctccggccgtcgtcgtcgtgcgccgtcgtcgtcggcggcgccgcaccggcacttgtcgctggcttcttcacgccgtcttcggccgcgtctggcgcaacctcgcattcgcagcctacgcatggggggctccggccctgcggctcgggagggccacgctacctctcttctgtcgtccctcggccgaccgctcgatccccagcagcagcagcagcgacggtcggcccaactgtcccgctcggaccctacggcaccctctcggccgcctacgcccagggcggcctcctccgaggcgtctaccgcgccctgccctggaccgccctctgccggagcgggatgggcgtcatgtttgggacgtacgaggtcctgctccgcgcccaagagcaggcgtggggcgtcgccggccagggcgggctcggcaaggccggccagacgtttttggccggcgcggcgagctcgctcgtcttttggaccgtcttcctcccaggtgcgtgcgcgaccttggctaaatctcatcagggtgtctcttcgaccgatggcgcttgactgacgactcgccccttttcgcagccgacaacgtcaaggcaacgctcatgacggatgccgttaaccccgccgagcgcaagttccgcacctcgcgctccgccatcgcccacatctactcgctctccgccccgtccccctcctcttccccttcacccgccatcgccgccgccgctcggaccagcagcctgctcgaccgcttgctcgcgcgcgcacagaggctgaagccgttctggcgcggcggaggggccgtcgtcgcacgtgcgagcgtcgtcaatggcgtcgggctcgtcctttgggagggcgcgatgaacgccgtcggcgagaggacgctctcttaggcgccgctacgcctcgcggcgctgtcctctgtttacactcgtttgacgtcttcaaatttccgacgctcaagctcgagttaaagacgcctgtctgtctcctggctccgaacccggccggtccaacccacttacacgacgccggcccaccgccaccacctccgccccgccctcccgcaacagccgcccctcccgcagccggtccgccaagcccctccatgaggtcctcctccatcgagaggcctgccatgcctcctcctcctggtgcggctgtgggagggccgctgggttgggacgttgaggtctgggcagcgtcctttacgagctggaggggcgcgtacaaggaagagggcgagagccgtcagtcaccgacaaaagagcccgcgactggcgcgagagagagcaagaggggtgggggaggacaggaaaacgcaccttcgcgacccacttgccctccatccccaaccgccggtcctcgctccacgcccagcactgcacctcctcccccctcttgttgagccgctcgagccgctcgagcagcgcgcggccgtctgccggcgagggcgagggggagataaaggtgatgacggttgttggggcggcagagaccgggtcggggagggtggcgagcgaaagcgagagcttgccgtcttgcacctggctcgcgacgccaacgtcgaccgacaggagggtggaatgagtgaggagggggggtcagtaatgtcgtcgaaggtaaaagtcaacggcagccaaacgagccagcgaacgcaccatcttgaccagcctctcctccaacagcccgacctcgctcttgcaaacacccaccagacccgccagctcgccgaccgcgatccgcttgtacacgccgcagagccgggcgatgcgcctttcgaggaccgtccgaaggacggcctctgccaggccgaggttcgcatccttcttgagcgtgtcgacgtccgcggcagagaggacgtctgcgaccgtcggtcccgagctggcgccgagggtgatggccgatgcgctccggctaagcgatccgacgacttcaaccagcttccgatacgtcccgcctcctcctcccgaaccagtgatagtcttcccgacgcccgcgctcgtgtatttcggcaagcccccgacgtcgccgggctcaaggcggccgatgaggagctggacgaggacgagcttcttgtgcgccccgagctggacggccgctgcgctcccgctcgcggttggggttgagagggccgagaggaggtggtcggctgcggtgctgagggccgacgcagagggcgaggggtggaggagaagcgagaggtgggctaggaggtaggatgtcgttgggaaatcgagcgggctgagagcaaagtgctgcagggcgaagggggagacaagagtcagccgcagcgttgctcggaggcgaccgtttcgcataccgtcttcccaatcaaccccagtctctcatttctctctcgtccacctcagcccagtcaatggaagcagcgcgcgcgcacaagacgcacctttgcgaacaccccgtcgatcgggcctttgacgagcagccgctcgcgggcaaacccgagctcgcccgttcggaggcaggcctcgaggagtggcgcgtggaggcccgtcaggacgtgcctcgaccgatggccgctgctcgcggtcgtcgtcgctgacgacgctgagccgccggcgggggccggggggagggacgcgagcgaatgcggcgcggtcgaggcccaagcgtcaagcatcgccccgagcggtccgaccgcctggcgctcccagccaacctcttttgcgagccgcgcgaatgccaggccgagaacgttgacggtcggagcggactcggagggcgaggcgatgtaggctgggagctgaagggcggcgaggtgggcgacgaggtggaaggcagagtgggcggcagcgtgcccgtcgaggccgatgtcgactgccagcgccggcgctgaggaggacactgtggggtcggacgagggcggcgtgccgaggagactgtcgagcgcgagctggacacgcgcatggacgaccgcaagcacggcgacgggcctcgcccgccaatcggccagcagcgagagcacgtccccctcgtcctcgtcctcctcctgacccgccggcggagggaagagagcgacctggtcgagcgtgagggcggcgagtgtctgtctgacgagctggacgtcttcttgcggtgctgggtcgaggacgagctggcgaagaaggtcggccatcgtgcgcgtgagtggtcagggtggatgcgcggcaggggagagagtgggagggggcgatggagggagagtgcgcagtctcttacggccgagtcacgcaatgggtgtaacggggtcttacagggcgaggctggcttcgggccgagatgccctcctcccttctctcctccttcgtaccatatacatctacccagcatggccgcctacgacgacgcaatcctcccttcaaagcgcatgatggagggtcagctccgaccgactcatcacacaccgacaaggctgaccgcccgtcccttccgcctcgcagccatggaggtcgaccgtcagctccacctgcgcgagacggccgtccgctcggccgaggtcaagctcgtcaagcagacgctcgaccagtgcgcccttaccgagggcgtcaacgcgctcgagaactgcgacaagctcgttaggcagtacctccggatgatgaagacgcacaaggtccgtctttggcccgcgttcttgctctctctcggtcgttcgggagctcgtccgttgccttgcgttggccttccttcctctctcggccgcaacggcccgtccccccaaggcgagctggccaagccaaggagttcagcccacctccccaagcccgaagacgcgactccgcctcctgcccgcttcttcctttcaccacctttccgagcctatcccgagctccatgaagcacgccgcgaaacctctcccgcctcgcctgcccggcctggttagaagacgagcgacattcacgtccgcttccgctcgtgcacctgcacagctgcggcgcttggtaggctagcgggtcggagggggcggagcgggcgtgtgtctgctcgttcgctccgctgctcgccaggcaggcagggcgggtagggacgaccggacggcgcatttcgcgttcaccgtacccgtgtgcgcggggccgacgccaacgccagagcgaagcacgctggtagaggaccgacctcctctcgtcatttgcgcctgcctgcctgctttacctgttggctatgagcgggcgaggagcggcccgcgactgggcggtcggccggtcagcccctcgggtgagccctgacgctcgccttcacgccagcccgaacggcgagctcctccgggcgcccgcttgggcgttggacgagccgtgcctttccagacagagcagggcgggctggccagccagcgacggacggaggggcgggcgggcagcttggtcgtgcgccggccggccggcctcgggccctgttctggggctgctgttcatgccccggaaggcaagggggacgagcggatgctcccttcttcttctaccctctttttgccttcccgacaccgacgcgcacgcctctccgcaaccgttcctctagcccaggaggccaactgacgccttgcctccctttctcccgccgccgacgacgcgcagcccgaagatttccgcgcctaccaccgggccaaatactttgtcgtcccctcctcggaccccttccagccgctccacaacgcgccttcggacctgagcgaggggcagaagctgtacctcgggcaggagggcgtggacgcgctgaatgggcggcgggcggctgaggagggggagcgcaagtagggcggagcgcccgaacgtgaagtgatagcactttgtatagggtgcattgctgggctggaagcgctgggacgtcagcgtgaacatctggtctggaacggctgagagaaagccggacaaacaaggcgcagatcgtgtaggctccggccccatcgtcctcttgccaaccttctgggtcgccaatacgttgagcaccgttcgacaagctagctggactctgatagtagcagccgccagcaccaggcgagggcacaatccgcttggcgtactcgatgctcgtcgccccctggcggagctcggccgaagcgggtagcgcggcggcaatgagggcagcagcggccggcgctgcgagcttcagtgcgattgagaggaagagcatggcgaggcaaaggattcgagtaggcgaccaactgcgaccgcgggggcgagcgagaggtgccgggcgggggcgctagactgcagcaggaggtggtggtggccggtggcgagcgagaggtcgaggcggcgtcgacgctggagagcagcaatctttggcccgtccatttcgctcggttcagacagcgcgcgagtttgggaaggggagccggcgtgcacggtcgctcgttgatggcgttttgacgacgcatggagagagagcggccggccaacccggcaccgtggtcgttgagcgtcgagccggccaggattgccaccgtccgttgtaagagaggtcgaagccgtgaagagttcggtcagacgagcttctgcgaaaagcctatgagcggcgagcaggctgagctgcagggcgcaacaggaagacgacggcagaaggcatgaggtcgagccggctcccgagaggcctcgctgctggcgagccttgcgttcctctaggccgtgagctgtgagcggtgctgggtctcaattagcagtacctgcgcaggatgagctggcaagtgcggcggctgcagcagaagcagaagcagcaccagcaccagcattgcggtcgggcggacggcgaggggttggtcgaggcggcgcgagatcgagctcgcgatgctccctccggccatgacccgggcatgctcgtggactgacccgattcgctgtaccgagcagtactaaaattccgggcagctcacggctcttctggccagcccatgatcggtcaatgcgtcgactcgcttcagccggtgctgcatgctgggcagccggcgtcaacggcgctggcggcgggcttgatgccccaggctcgtcgcctgccctgctgcctccaaccccgccaagcttggtcgaccctgaagtagcggctgacccagatggcgctgaccctatcacccgctcaattgcgcggccatattctagtcctccttcggcctgatcgccatcgtccggctcgaaggagtcgcgcgccccttgatcaagtaggcgccgcctctgcgaccgcggtcgaccgtccacgaaccggaagtcgacggcagcatacgcgtccgcctcttgcttgccttccggctggaaccgtgcccgcttcacacagggcaatcctggcaactgagctcggcttgacttattcgctaaatgcgtacagcggctcggggacagcgttcgctctctttcccctcgagcctcgcccggtccgtctgtcgctcgcccttgagccgtcaggccaccttcgtccgcaatgtttcaccggacgtcaagcaatgctcctcctctctaccgccaagctcggagcggtcgctgcttccctcttcgcagcagcgtcactcgcctcggccgaactttcgcagtgcccgaccggaatcgaatacatcaagcgcttcgcggctccgcccgcgggaacgagatgcaacttctcctgcccgacctcgctcaaggacaacgatggcgtgcaggctgtccaggagaaggcccgagaggaggttcacgcagtgctactagtacgttcttgctgctgtccgattgtaagactgatcgaagctgactcactttccggctggacagccctgtccatggtatccactgcttttatactgacgacggccgcccttacgttccggccggcaattccgtccagtgccagctctcggctgtcgcccctcctgccgactgcgccccgacccggaaaacggcgagtcctcaccctcctcgagcaactacgcaagtcgcgccagtatgagcccaagcgccgggcggccggccagcgataaacggtgcatcgcacgacggcagacagcgaccgtcctgttcgacatcaccgaggggctcgccgtcggagtcttgaaaatagcagttgacctcgtagttgtccttcagactatgaggcgactggtcaggcaaaaaggacgcgaggaggggagtaatagcacgacgcactaggtacacgacgtagctggccgacctggcactggggcccctgtcccttggcccagcaggacgatttcgtccgtcgtagttgccggacactcgtagtagcagccattgacgcccggcgaagctgcgaaccgcttgacgtactcgacgcctgtcggaccctgccgaagctctgccgaggcgatcggggcggccacgagaagcgaagcggcgagggccgcgagttggacgacaattgtggaaaggagcatcctgaggccgaaactagacaaccggatacactgggttgggccggaggtcgaaagaacagccaggcgtcaactttgaggctgccaaggaagtgaaggtgaaggggagggtgaagagggaagagggaagagtcagcgaggtcaaccttggcgaacgattcttcagccgaatcccgctcgctggccagctcaggtcggcggcgagtacactgctttgagggaggggagcgtcgcgcacacaccggctggaacggtggcgttcgacacgttatgcttgagcagccgctgaacgagacgcatgcgacgcgcaacgcgatcgggcccgaggctggatgcgacggtgccgttccctctgaccgcttcattagccatgggcgggtcagcagcgtccgtttctcgagctcgacaacacgccagagcacgaggccggctgctacgacgaggcagaactgtcgacggttagaaaggttcaacgagccgggctgccagggccggcgggccgagccgaaggcgggcggtgccggcgacgagctgctcgtttgcaccccgcgcactgccgctgagcgtgagcagctgggtagacaggcctggtcagacttgacagttgtcgatgacctgccgagaacagcggggtgtgagaagggaaggcagcatggcgtcctgccgggtcaacgtcgagagacaaagccgggagcgcgagctcgtcgcccgtcgttgctcactccgaacggccatgccgcctcaacctgatttccacgacccgctgacatccaagcggcctagagctcaccctagagcaggagagtcggccggctgttatcgaacctgcctcccgtgctccagcagggacaggcgatggctggctgtgcgtgccttcatcgtcgacgagctcgcacgccgacctcgcctgcctggacgggcctttgaccccagctctcatcggcctgcagcaaccgcatatcttgctttcgctgctcgcccgagccggcttctgactgaccgttggtatcactcgcgctgatccgacatcggcagctctggtcgacccttcgttggtcgctcggcgacctgagcccgccacccccccccggcgtcccgaagcaggaccttctgacggtcggctcgctcctcggcctcaagctgtttggcgtgcgttctttctctcggccttgacccctcatccctcgctgacgtctctctctctcttcgcagaacgagtttgtcgcctacctccagctctcaacgattggccgcgagaacatgacggaacgcggctacctaattgcgacctacgccctctgcggctgtgcgtctttcttttgatctgaacctgctctgtcgtacgtgaacactgacgagacggccccctggacgatgcagtcgccaactttggttcgctcggtatccagatcggtgtcctctccggtctcgctccgtcgcgggcaaagattatcgccgtcattgcgccctcggcgctcatctttggcttcctctcgacctgccaggtcagtcgaggcctccttgctgccgtcccttcatcgctcgcgccgactgacgccttcttgcgcgcgccacagactgcgacaatcgccggcatgatggtctaaaaagggcccgttctccttgggtctctctctccctccgtctctctcctcatctcctccggtggacccgccgttgtccttgtactacctcccacgagtagggcgccttctttgctaccttgtcgctgtacgtgagtaggctcgtctcctcccttttccgattcgcgagggtcatcaggctgaccagtctgccctcttgcccttcgcagcctaatcctccccgtcttcgcgcttgttttacctttgctaccctctcacccccctcctcgtgcttgtcttgccggctatctcgaatgcaaaacgtagacgctcccatcctgctccgaccgtcagacgctgattcgctccgttgagacgagcgccattgagtctcgaccgcgctgcccgtcgcctggcctcaggcgcgcgccaggcttccccgaaggcagcgagaacatgtaactcctcggcggcgagcacttgtatttctcctcagcagcgcatcaccgccgcgccggtcagccttgaggtcgcacgtcgaaccgcagctatctcgcgtaaggaggccctaaaccagcaccccaaccggccaaagcagaaggcagactcataagatcgtgaataaaaagggcgggagaagtcgaggggctattaggtatgaggagagaccgctcaggcggtgtattcgggcagggtgagcgagtcgcccgagcacttggcgctgcagaggaggagcgggaggagaggcaggggtgagggtcagttgaggtgctctcccagagcagtgagagcaaggcgagaggaagccgacgcacctgagcagggtgatgggcttgcggtagagggtcgcaatcatgagccggccgtcgtccggcccggcaccggtcccgcgctggctgaagaagacctcgacgacgagctcgctcgagaaggacaggccggcgggcgagcccttggcggcggagagcgtcgtcggtcggagggccgagtcctgaaggcggcgagagcagagaagaggagggtgcgaggtcagcctcggtcgaggtgcagagcagtagcagcagcagacagagggggagggacgcacgaggttgccgctcgcgctgagcgaccagccgtcctccttctcacctgcaggccggccggggacgagcagaaggtccgagccgtgccgctcggccgcccgggtcgcaaagtcggccgcctgccagccctcgaggtagccctgggtgaagagcgcccgcttcgggccggcgaccttctgttccgtctcgcctcctgccgttgccgagcgcgtccggaccgtctggcagacgtaggcccgagtgccatagatcgtgacgtcgtcggccgggcaagggagcgagagctcaaagtcgacccggtcgccgatcgtcagggcctcggcgctgacctggagccgctgtgggcccgaccagggcaggtcattgctgacttcatcctcgaacgagaggtctgaagatggagggcaaaggcgtcagtctttggttctccaaacggcagtctgcgagagcgagggaggaagtggagacgcaccagggccgtcgatccggtccggcaggtggacgacgcagacgtccttgctcacgacgaggtcggccttgaggaggctgcctgagccgacgacgtgggcactcaggacgtggcgcaggccgccaaacgggctcggtgcgatcgacgcagggcagctgttgggcacgcgcaggctaaactcgaagctgcagtggagaggagccggtcagcgtccgactcgttggatggcagagaggcgacgggcaaggcgagaggacgaacgtgttgacgcccttgacgagctggatgtgctcgaggccggcgacgtcggcgagtgagagcgaccgctcgaacgcgacgtacgactcgggcggcccgccctggagcgcgagccggccctcggccttgagcgtcaggcagacgtcgtcgacagtccggcgcgaagtcgacacgaccgagacgatgccacggagcatggcctgccgtgggaaaggaggcgggacgtcagctcgtggtcactctcgaagaaggaggctgggctggcactcaccccgccgggcccgtccttgggctcctggccgccgcagcagccgtcgaggtcgaggtcgaggtcgaggtcgtcgaaccgccggcgcgggcggacaaagaccgtgtcctcagccaggcagagggcaacggtcgattttgtcgtcttgagcgaccggaccgaccggacgaggtgcggcaggtaggcggccggcgtctcgagcggccggcagggctggatgaggtcgagcgtgagcttgctgctcgatgcgaccggcgagggcgagtaggccgggagcatcggcgagtaggctgggagcgacatcggggcgagcgagagagaaaaggggcttcgggcgagttcgggtccgggaggtgtggtcgggtgctgggtgtcgactgcgggagagggagggtcggtaagggcgagcaggagctgctggacgggaggatgctggcggttgatgggctgccgacggtcgtcagcttccctcccctccctcttgaaggaaaaccgcccgtccgcctacaggccggccacaacgttggcgcaaaggcggggtgaaggtgcgcgagccggcgcgccggccacgcgtgcggctacagggtgcagggcgcgccgcccccgtcaccgcggctcgctggtcgcagacggcgagtcgggaacctcgtcggcgggcggcagcagaccagagcgaggggctcgcgcaggcgcgagcgacctagtgcgagaccggctcttcttgtgagcgagagtgtcagtgcttgcgctcgcgaaagaaggggtcgacgtcgacaggtgggctgaggtcgtcgggttcggagggacggctgccttgagacgccgccgcgggcgagacgaccaatcgcgcacggcaaagtcgcctcaaaggacgcatgcgcacggcgagctcctgctctcgttcatgccaatggcagctcctccagacatggtcatcctgctcgcccctggtccagcgtagagggaaggagcatcgagtcgagggccagagacggccggcctgtgcctggttcgacgacgacgaccaagggttcccacggccggctacgcgtcggcggccccgcgagacgagggacgacaagcgggccagcgagagcagggttgctcgtttgcggatgggggggagtagtgggaggaggaggaggaggaggagaagatggccgggcaggcagggcgagcgtggatgggcgcgcgccctcgtcgtccccgcgtgcccgaccccgcacgtacgcacacccgggtcactgacgacgacgggccctcctgccattcgtcctcgatgcttatcgcaaagggctgcaagacggaagcgaaggagcccacccgacacgcttcctccagtcaacggcaaccccctgcccttctcctacggccaaatcgtacaggcagccattcatcatcgcgtgaaggtcaatcaccagacgacgcccgacccgagcagccccccgtcgctctcctctgggtcgacccgcgcaaagctcgtcgtccgccaagcgctggccgcgcgttcgtcgtcgtcgtcctcctcgttggctgttgcgccggcgaggagggtgttagtcgcaggagaccgggcgtagaagtccggattggaccgggagaagccgtccatctcggccctgacgacccgctccatcgcgtccgcccgtgctcggacggccgggtcgagctgcttgtcgagcgcgaggggagagagcgcgagcggccgggctttgatggcctttggtggcggagggggcggcaagagggcagatgagctggtagcagtggaagacgagcgaggcggcgcgtgctggtagacgccctcgacgagcgcgacgtgcgctttcgtcgaccagcgcgtctcggcgtcgatcgtcgtcgtcgacgacggggacggtccgtcgacgtcgactgcggccgtcgtcggggctgaaggaggaagggcgagcgagggcggcttgagttgccctccaccattgacacacccgctcgggcacgccatcacctcgacatagtcgtacgcgcccttttccgccgcgcccgcgcccgcgccgcctgctcgcccggcagcggcggcagaggtggaggaggccttgccgacggcaagcttcgttttgcggacgacgttttggaggttcttgaagccgtagcatgcggccgcgcggaggaggacggtccctgctggtgggagctcaagaccggccgaggaggagcgctcgcccgacgacgccgctgctgctgccggcgctgctgctgctgctgctgctgctgccgatgactcctccgccatcgccggcgctgctgctgggtccggtccgaccgccagcacatactcgacgtaatccgcactcgcccgaatcggcgtctcggccaggacgagctgccttcggtcgcttgagccaccctcgggctcgtaagcgcctgcgacgtgggctaggacggcgtggaggtagccgtcggatgacgagcccgggtggcggatgtcttgcgggagggaggccagcgtgaaagacccggcggggggggcggcggcggagggcgcggcgtcggaggagaatgaggcagaggaggtggtaggggaggaggaggaggaggaggaggcgtccgagtctggcagaggcggcggcccgaccgccgggtcccagccggcccgctcgagcagctgcgcaaactcgtcggtcgaaagcacgaggtccgtctctggcaccctctcgtcctcaccctcgtcgtcgtcgcccgcctcggtgctgccttcgccgttgccaccacctttaccacccccccgggcgagcacgcggaagcccgtcctgctcgactcgagcttccgatccggacacggctggaccgcaacgtggtagcactgatccggcctcagcccgtgcttccttgcccagaaacccttgacgatcgcgccctgcatgccgagcggcgagcgggcgcgtgcgagctgcggaaggaggacgccgtgtgccttttcggcgtaacagacccaaccggggcaggcggacgccaacaccggcccgaccggcgccgccgccgtcgttcccggccgctgctgctgccgccgctgccgacgcgaggcaaaatcgcggaccgtttcgcccagcgcgagatggcgggcaaacgtcgtgtcgctgacgtgggcgatgccgatcgatggcaggaagtgggcgagcgagcggaggagggcggagggtgcgctgtttggggaggaaggcgcgagggcggccgagagggaggcgagcgactgggggcttagcgagaggaagatcgtcttttgcgagctggtcggcagcggcggcggcggggggggttgagccgagctcgacgacgaggagggttgggcagcgaggtcgacgagcgcgtcgccgtcgtcgtcggcggccgaagcgcccagcactccagcaggcaggagcttcaaaagcggcttgagcgagtgcgtctggagcaagagctcctgcgaggtggtgatgcagcctctggcgaaagagagaggaggggaagggcgagggcttgttggtcagcgagccgactgactgcgcgcgcgcgctctcacccttcaacctcccaacccccgccctacccaacgccggcgagcaaagaaggctgaaaggaacgcacgagcacgccagacagtcattcagactgatctcggcctttttgagcttcttgcgctggccggtggtggaggaggaggaggggaggtcatggatgccaacgccacctacaccgctgacggcggcggtcgtctcaaagtaggcgccggtcgagcggtcaatctcgattgctgtcttctgcgggccgtcggcaagggactatagagggtcagcttatcgcctaccgtgggtgaggcaggcaggtaaggaaagaggaggggcacacgcaccgcgccatcgccgagctgctcgaccggctcgagctcgtcgaccggccggatgcacgcctggctcggggcgaggtagtcgttcaaatccgagagggtctgtccacggccgacaaggagggtcagcttgaggtgtggtgctggtaaagaggccagccagggcgggacggacgagtgttgcggagaaggccatattgctgctggttctggtgaagggtgagggtggagggcggcttgacgcgggtgagagggtcaacagaaaccccgatcggggcactttgccctcttctgcgccggccaatgagcgctggccatcttgctgccctggccttccctcccaaccccttagcaagccagccatggtccgttcccctcagtctcttcacaagccagacagcggctgacatcatccgcgcatgcagtcgtccaacctcggcccgggcatcggttccgtcccctcggcctcctcctccgtctgctcgcacgccaagctgaccctgcttgcttgctcgaccggcagtgcctccgtgttaccgcttcctccaggacctcaacatcgtgcgtccctccagcttggcaagcgggcggacgggcgggtagaacgaccagcatgctgcgacgctcgtgttggttgctcgcgctctcgctcgctcgcacagccagccagccagccagccctctctcccacgcgagactaccctccgcccgatcagcacagcacaggtcctgacgccctcccgccccgcccgcccgtctccagtgccactcgacagcgacccgcgaccccaaggtcgagtgcgcgctccagatcgaggactttctcgagtgctcgcgcaaggacaaagaggtcagtcgtcggcctcccctttctctctcgagagcgcccatgcccgcgcccgcgcccgccccagccttatcctccccggctccgcctcctccatctccggccaagcctacctcctcaagccccggccgaccgccgaaaactcggtcgaggcaatgctcgtcgacccgccgttcgccgttgatccggcttcaggcgaatggagaaggaccgagcatgtccgatacttgaagcacgcgtttggtgcgccgatcctctctcgctttcttactctctctctctctctctctctctgtctttttctccacagacctctccacagaccaagcgaaactgaccagcccgtgcgttctcgtcttcgtcgagagtaggcgaaaaccccgcccgcgtcttccaccaaggccgacccgattcgctctttgctctccgctcgatctacggcgaagcgcggtccgtcaagctcgcgcaggacggctggtgcgctcgcgcgcgagcgggcgaaagcggcttggggccgtatccggcgagcagcctgcggttggagtcgctcgtgcgtgtaaagcttcgcgggcaggtggtcggtgggatttgcgagggtgtcgggcggcacggctgaccgcttttctgctctttgggatgcgccttgaggaacgcaggtcgagacgctccgaggtaaagtccgagttaacgcacacgtttacgaagcgtccgtccccgagcgcgagtcagagtgcccggggccgaccctggttggctgaactgactgactgattgactgctgcgcttcgtggttcggcttgcttcaggaccgacttggacgcggtcgtccggctctcgaacgagttccagtgcgctccgcctctctccctcgctcaccacgctcgcctcctatgaccttcccgtgctgggaaagcgagagtcgcactgacttccctcttaattgtccgattgaccgaccccgcctaccaggttccgcttcgccgccgttcaccatgcgcacgaggcgcacctcgtcccgggcctgctaaagcgcatgtggaagggtccgccgggcgttgctctctttgcaaccttttcaaggtcctcgtcttcgcaacccttctcccgcgctcagaatagatagctgacctgcacccttggtttttggcatgcgctcggaaaggtacaagcgcgaggcataccggcattcggtccacgccgctaagatcctcgccgatgccggcagtcagtttcttagcgccccacccatgaccctctctctcgcacgtcgcaacgctgaccccttctcctcccttcccaccggggacagtcgccgtcgcgatgaagtcggaccatcccgcgatcgacagccgctacgtcctacacgaggccgtccaggcgcatcattacgggcttaatgcgacgctggcgctgagggcggtgacgacgacgccggcggagctgcttggcaagggccatcggatcggctatatcaaggtcggacacgatgccggtccgtccctgaggccccctcgctcaaggcggcgcacatcatgcccgggcagaacgccgctttcgctgactctctccgcgcgcctgcgtacggccccgccagacgtcgtcctctggcagtcgcacccgctccagctcggcgcgacgccagcccaagtcttcatcgacggcatcccccagctcgacgacccgcagctcgtcccgcgccctccttctgcacaagtcgcgccctcgccgcctgactactcgagggagattgcagacgtcatcgactcacggggcgagacggaactggcggcgaccgagcgtgtgccgaacgtcgtgttcgtcaacgttgcgtcggtcgttgttcgggccggctacgagctcaaggagatgctcggcgacgagttcagggcaagcagcggaggaggaagggcgaccgtcgtcgtccactctggcgagattgtctgcgcaggcgactgcgactcgacccccgccttcaacgacgcctcaacgcccgtcgtcaacctcgagggcgggtcgattagcccgggcctgacggcctacggcgcctcggtcggcctctcgcacatcgactttgagccctcgacgggcgattccgggctcgatccgtttgagctcggtcggccgccaacgtttatccggcatgcgagcgatgcgctcgtctttgacagcaagcaggacgtcagtcctcatcatgcacgagcatgcacgtcgaggcgccatcggctgacactcggcgccaacaccccgctcagcacgtcgccctccgctccggcgtcacccacgccgtctcccctccatccggctccatagacggcgaccccctctttcgcggcttctccgtcttccactcgctctcggctcctcaccgtctcgcgccgggcgccgtcctagcgcgcgaggccgggctggccgtcacggtcggccattccgggacgcctctgtcggcgcagatcgcgcttttgcgcgaggtgttgaccgagaaggtcgagcgggggaggaggaacaagtttcaggaggcagttgagcgcgtgacaaggggcgagacgccgctggtcgtctcggttaacagcgccgaccaggttgcgtccgatgtgcatcccttcgacgatcttgaagcggggcgactgacatctaccccgcccgcccgcacgttcgccagatggcgaccctcctcgagctcaaagccgaggttgaagccctccatgcccgtcccctccggctcgtcctccacggcgcaaaggaggcccatctgctcgcgcccgagctcgcccgcgcaaacgtcagcgtcatcgtcggcccggcgagggcacagccgctcgactgggactcgaggagggtgttggcgggcgtgccgttgacgggcgagacgacgctgtcggcgttgaagaaggcgggcgtcgtgcgttgtcgactctccggcccgctttccttgaggccgggccgtttcgctgacgtccgcttgataaacattgatcatgtcaggccgttgcgatcggggtgaacgacgcagagccgcctttcgcctcggcgatcggcacgactcgatggacgctcgcctttgtccgtccccccatccaccccttctctcactacacccggctgaacccacccctcacccgcgcccgtgcagacccagaccgactcggtcgattcgcccttccgcagcccactcgaggccctcaagctcgcgaccgtctcgctcgagcgcatgctcggcctccccaccgacgaagccggcgaaggcggggagaggaactgggtcgcgacgagccgtgcggggctgcttgacgtcgaggcgaaggtggtggcaattgggacggggaaggacgtcctgctcttctgagccgtccgcccgttcgcgccactccaagtgctagcgatgccaagcgagcgtaacgaggagacatgacgaatgagagcatgcttcatctcgaacctgacaagtcggtgccgctcaagacgactcgcccgacgtcgccgccgcctcgcgcgtctcttcctcccagacttcgagcagccgcgcccggagccgggccatcatcgactcgctgagcgctgtcggcccgtcgggcgtcaggacgcggtaggccggcatgggcgcgtaggtcgttgggtcggcctggttgccaggcgagcggacggtcacgcatgcgggcgcacgggacgggaaggaggaggggtccatgaaccaacgacgacggcggccctgacggtctgagcaatgtcatgacctgcgcttgtctcacgctcgacagagcgcagcaagcatcactgccgtcgcccgtcgtttcgcccgagagcagctggctcgctcagacggctttcagggcgtagaggagggcgcgcgggcgtggacgtgggtgggtaagccccgctccccgctccaagcttgtcggtccggctggtcggtctggttcgcgttcgcagcgttgttgagcaaaggcaaaagggcggagagtactgagtactcccctcgcttccccccttcctgctctacggcctgcacctccttcgcttcgcgccttctccataactctctagcaattgcaacagccctcctgccccagcttgcaaaaagtcccaaaccttatctatcccgagtttccgccgtcaacttcggaaaggcagcggacgctcacccccttgcaccacgaagtcctgcctggcctacacaagcccctccccttccctccactcctcttgagttgtcgccagacctgcaagcgatggggaggagaccagaggtctacatgttcatcgctgcgttgaggtcgcttccgagtctgcacggccgggcgagcgagagagagaggaggggggggagggacgaaagggagagaaggaagagaggatcagcgccaggccttcttctgctctgaggatcaatttcccgttgaggatgatgcgagcgagagagagagagcccgctagagagagttttggagaggagggaggtgggaagggcgactcgatgagagaggccgcacacatccaatcgcgcaccggacgggcttccgctcctcttgagcagcgacggatggcatgcgagccccccccccccctctttctccattccgccagctgcggtcggacggaaccgcaacacagcagatgtcgggtgtggcggagggatgaaggaaatgagttgcgttcgcgcgcgcgcgcgcgtcgcctctcgacacacccagcccgcacgttaccgctccgctccgacagctcagcggagcgtgctccaaacgagcgctccgagaccaacgacgagcgcgccgacgatcgccggccccgcaagggtcgaggaggccgaggtgacggacgccacagccggaccctttggcgaggcctttgaccgaggctgaggcgcagccttggacgcgggcggggggcggagggaagagcgtgcgagaggcgaggaggaggaggaggaggtgggggtagacgaaggagcaaggacagaatggaccaaccccatcgcgacaaatctgggagaaaccgagggggcgcgcgccatcgagcggcgggtcagcttcctccgactaaagcgcaacagcagcagggcagaaaaagaggcgggcgggccgacaactcacccccggatgtaaaacgcatgcaagttgctctccatctccttctcgcggccgcgcgggacgccctcgagcgtaaagctcgccgtcgtcgcctcctggccctgctcgagcttgacctcgagcgtgccttcgtgtcctgccggccagcccgaggcgccgctgctgccgacgagcgcccaggtcgagctgaacgtcgttggcttctcggcgctgaggatccgacctttgaccgagcccccaaaaagcgcgaacggtgcacccggagtgggcgagaactgcgcggccgagcgggaccagctcggaatcttggcctcgtcggtgaggagcgaccagaggtcggcggctgagatgcggagctcggcccggacgaggacggtgctcgtgttgatcttggccgccgccgacgacgacgcggtcgagccgtccttcgtaggattggcagccgtagctggcgtcgagctagcggaagccacgccagcgccgggggtgctcgacccgctagcggacgccgaggcggcagccgctgcgggctccggcgcagcaatcatgtccttcccgtgcacgtcgacgagcgcgtctctgaacgagctgaagaacggctcgaggagcgtcgggaggagcttgcgggtcgcgaggtaggggggcgtgccagatgagggcgaggtgaagttgtactggcggcgggcgggcaggcagatccccagacgcgtcagcgctttgtttggacgagtttcgagaagggcctatagcacagaaagagagagaggcagagacgtacagcgtagtccgacagcccgtcgatcgcctcgtgcgagacttcggggatctggacggtgccctcgagcgtcgtttcgtcagcagcgactgtcgccgtccagccgagcgtcatgtcgaggtcgtagattgtcacgacccttcaaacgagccgcaaagaggaagggcatcagctcgggcgcacggagttggagcatcgctctcgaaggcgaggatcacccgagagtacctggggtgtaaggcagggacgacggacggactttgatttgcgctggccgacagtgacgtcgccctcgattgacttgacgccagtgatggccacctcgatcccggccgtcgcgtccgaaccgcggacggagggtgcgttcgtcttgaactgcgttcggggcggagcgggtggaaagggttcagctcggtcggcggagaaggcggctggcaaggagctgggcaggcaaaggagccggagccggggctggtcgagaggggcggacaaaaacgaggcggcagtagcgctcaggccggccttgctttcctcgcgcccacccaccctgcccggctcgcgacccgatcctaaaggacgaggacgaacccagtcatacgcccacttgtcgacctgcttttgctaagagggcaggggtagggcaggacaaaggtcgtcagctcgaaacctcgagtcggcccggaaggcagcaaacaccgagggccggctgtgagcagacgtacgcgccagtgccagtttttaagtccagcgctgaggggagtgacagacatcgttgcgagagagtgagagcaggtacgaggtgaatggcaggaggaggcaagatggccgcctcgccgccgaaagcaagccgccagttacgtactcaagcgtaaacgagcgtaagggcccggcgacggccgacagcctcccctctccctcgaccttgtccagctcgacctccatagccgacctgccaggatgtgcatcgtcatctacgcggccgattcgcacccgacctacaagctgtccgtccctctctaccctgtcgatcactcatctcgcgcctcgccggtcggtcagtcggcaggcaacgcgcagcgctcgaccccccacctcctccacctcctcgcggctcctgaccccctctcctgtcctctgctcgccgcccagcatcctcgtaagcaaccgcgacgagtttcttcatcgcccaaccctcccggcaacctggcggaggagcctggcaagcggtggagagccggcaggggagggcagcgcaggaggcgatggcgacgagggcagcgtgctgtgtgggcttgacgccgtcggaggcgggacgtggctcgggctcgcgaaggacggccggctcggcgttctgtaagtctccaagcaccagtaagcttctgtcgtcttgctgaacttccttgccgctcgctcgctcgcttgctcgtcaggacgaacttcaccgagccctcacccgcccgccactgtcgcgcgcgcccgccgccgctcatcgatcggcccctcctctccgcccgaaccggcttctggcctaccactcaacagagcactcgcagccccgcaagcgctacccaatctcaacctcggccgccgacctcgacggcaagacgtttgactttgtcgtcgccgggtgcgtcttttttttcctcttcttgttgtcccgccgagccaagaacggcgagaggggtcgtttccgcgcgcgccgagccaacctcccccgcattcgccgccgagactcgctccagcccgccgcggcgcctgtcacccctccgaccctcctcacctcttgtcctccttctttcagtgaaaacaacacctttgctgacccaccttgccctctctcctactagtggcggtctcgccggcctggcgatcgcggctcggctggccgagtactcgaacatgacggtcgccgtcatcgaggccggcaagacgggcgacgagcccgaggtcaaggacctgatcgacattccgggcaactcgtacctgaacggtctgaccaagaccgagtacgattgggcttacgtgacgacggcccaggccgacgcaggtgggacgcccaagccctggccgcggggcaaggtcctcggcggctcgggcgcgatcaacggcatgttctggtgccggggcgacaagtccgagtatgacgcttgggccaagctcaaccctggtggcgaggtcacgtgggacggcgacgaggtcttcaagtacattaacaaggctgagacgtacacgccgccgacggccgagcagattgcctattcgaacggcggcgagttcgatgcaagcgtccacgggacgagcggcccgattcaggccggcttttcggcctactggtacggcggctacgagaagtggatcccggcctgggagtcgctcggcttcccgtcggtcgacggcgccggcggaaagaaccgcggcgggtccatcacgcccagcacgctcaacccggccaaccagacccggtccgactcgaaggccggctacatcgagtacgccttcgtctctgctagcccttgtcgtgcttctccggctgacctttttcgctcctcgtgccagctcgctcccgcccaaggacaacctcgtcatcctgacgggcttccaggtgacctcgctcgtcttcaacgacacctcggccggcaacgtctttgcctcgggcgtcaacttcaaggcctcggccaccggccaggagtacacggtcaacgtcggcaaggaggtcattctctcgggcgggacgattggctcgccccagatgctccagctctcgggcatcggcccggccgacacgctccgggccgccggcgtcgaccaagtgattgacctcccggtcggctacaaccttcaggaccacacgtcaaacacgatgtactggacgacgccgccggggacctcgacctggggcacgctccgtgacgacaaggccgtcagcgacgcggcgatggccgcttataagtccggcgactatgccaactcgcagtggacgtatgtcaacgaggccatcggctacgtcgccctcaaggacatcatgtcggactggcaggcgtttgcccagaacgcgaccgactttaccggtccgtctcgtcgcctttgtctccaaaggagctttcgctgacgacccatttcttccctctttggcagagtacaacgtcgaccggatggctgcgaagcagaagctcaacgccgcccagatgaagggcctgaccgctcagtacgagatcacgaacgagtggatgaccggcgacgtcggccaggtcgagattctcctgacggagctcggcggaacgacgaccgtcggcatccaggctgctgctcagcagtgcgtcctcttcctcgtcgccttctcttcttcctactcactgactctccgtccccgccttcagcccctacacgcgcggcaccgtcctcatctcgtccaaggacgccttcaccgcgcccatcatcgacccggcctactacggccacgagtacgacgttgccatcacgctcgctgcccagaactgggtccggacgctcgccaaggccaagccaatggacgagtacatgatcaccgagacgtaccctggcgccgggacgacgggcgatgcgctcgtcacctggttcaagggcgccgtcgcgaccgagtatcacattctcggtccgtgccccgcctttccttcctcttgacctcttttcgcgctttctgacgctccacacccttccggcgcgcacaggcacatgctcgatgctgccccgcgacatgggaggtgtcgtcgacacccggctcgtcgtctacggcaccaagaacatccgcgtcgtcgactcgtccatcatgccgatccaggtcgccgcccacctgatggccccgacctacggtatcgccgagaaggccgctgacctcgtccgtcccttctcatttgcttctttctatagatatgccagccgctgaccctacctttttcggtttgggcagatcaaggagcagtactgggccaaggccgaggagccgacctcatcggccgccgccggtaaggccaccgagtctggcagctcgtcgaccgccgtcgccgccggcgccaactcgacgccgggcgtcaacgagaacgccgcgagcagcggcagcagcaccctctcgaccggcgcaatcggtggcattgtcgctgccgctgtcgtcgctgccctcgccgccctcggctgggtcgtgcgtcctttcgctccctttcgccccccttggtgaccagcctagctgacagcccctccccgcttcaggcctttgcgctcatcaagcgccgcaaggcccgtgccgcggccattaacgagaagtccggatggtatgcccaggccgacaaccctgaggacgacccgtggacggcccccacgaaccgtgagtccttagaacgccgtccttcagcgctctcgtcgatccccggctgacctccccctcgcttccctccgtctagacatggcccttgccgaccggtccgcgaccggctcgccctcggccgccgctcccttcctccccggcgcggctggcgtcggcgctggcgccggcggcgcctactcggactacaaccacccggccccggcatttgccagctctggccaccgcgagagctactcgacgctcgacatggcgacggtcgagccgatgggctacgccacgcccgactatggcaacaacggcggcggcggcagcggcgtgcgtccctcctctccctcctccctcagagctcctcgctggatgactgacgcgtcccctcttgccgcctcatgcagacccacacgccctaccacgactcgccctactcgcaggcccggcactagagcgccgggcgcctttgaccccgaacctatttgcccgccctccccttcatatgcctggaggggctgtagactaacgcccatcgcgcgaaaggacttctcgaccgcctccttgcccttctctttctcgatcttttctctccctctctcgcaacaaatcaccctcttaatcgaaacacttgcaccctccttctctcctcgctccttgaggccttcctgctcatttgtgcagcgagcctccctcgaccctcatttgccatttcctttcgctgggtgggggaatggagatgcgaggggctgcgggctggcgaagcgagagtgggccttgaccctttgacggcgcatcggacctgtcttccgcattcgatcggcttgggcatccggccctctgatcgtgcattggacctgtcttccgcatggacgacggtcgatcggctcccgaactccgcccccttctcaccccttcagccgcaaccctcaagccatgtcgaccctccgcacgctcgcacaggctggccgcagagccgcagcaacacggccagcagcagcagcccgcgttctcttcgccgccgctgcccggcctgcgctcagccggcagcagcagcagcccgctcgcttgctcggccacccccagcagcagcagcgcctgaccgccagcagcagccggtcctatgcgaccgcctctgctgttgctgccgaggcaaccgagccagaggctaaggaggacgtctggcccgaacgcgtcctgcccgtcatgaccgcccaggaccatgcgcttgctcagcggcagcgtaatatcggagtgtgcgtcgtccctccctcctgctgcttgctttcgctcgacagcctgggttggatttctcttgcttttggagggagagcgcgtttctcctccctcgccgacaacagtgaggaggggtttgacacgaccgagtggggtgtttatgcctgcccttcccgcctcgctctcaagccgaggccggaaggcgctcgttcgctcgactggcgagtagcgacggcctgctcgagagctcgacttgcgcgaaggaggaggaggccggtagatctcgattgagcccggcagcgacggcggtcgagcggcgcctcagggaggcgaggatgggcgctagcgtgggggggccgaggaagggcgaaggtggaggacaacgatgttggctgtctgagaggcgctgtgccgggtcgggggacgggacggggggccggagcggtccttcgggctggctccttcctgcctggcgcaatcggctggagacgggcgaaccctgccatacccccttcgtcgacgactgcccgcctgcctttgccatgccctcactgacaaaccctcccacaccccctctttcccgcaccctcagttccgcccacattgactccggcaaaacgaccctgaccgagcggattctcttctataccggccgagtctctgcgatccacgaagtccgcgggcgcgacggcgtcggcgccaagatggacagcatggagctagagcgcgagaagggcatcacgatccagagcgcggcaacgttctgcgattggaaggcggtcccggtcgagcatgtcgccaaggaggggccggaggggagcgcgagggagagcttcaaggtcaacatcatcgacacgccgggtgcgtacacgctttttgctctcgttgaccttccgagcggcgtttctcactcgctcacgctgatgctttcttctccgcctcgttgcggctctgccccccttacgcctgtttccccttcccctccctctcgtcccgcccgcctccttcgcttgcgcccggacaggccacgtcgatttcacgatcgaggttgagcgcgccctccgcgtcctcgacggtgcgatcctcgtcctctgtgccgtctctggcgtccagtctcagacgatcacggtcgaccggcagatgcggcggtacaatgtcccgcgcgtgtcgttcatcaacaagatggaccggcaaggcgcgaatccatggaaggtcgtcgaccagatccggtacaagctgaagaagccggcggcggcggttcaggtgccgattggcgaggagggcggcctcaggggcgtcgtcgacctgctccggatgaaggccatctacaacgaggggccgaaagggtcagtctttgtcctgttttgcgtgctggggctgtccgcggacctcgcctcgtctggctgacgcacgcccccgactttcgcccgccgcctagcgtcgacgttcgcgagtcggacgaaatccctgctgaagtcgccgagctcgcggcaagcaagcgggccgagctcatcgagcatgtcgccgaggtcgacgaggtcctctctgacctcttcctcgacgaacagcccatctcgccgaccgacctcgcctctgcgatccggcgcgcgaccctcgccaacgcctttacgcctgtcttcctcggctcggccctcgcaaacacgggcatccaggcactcctcgacggcgtcgtcgcatacctccccgatccgtccgaggttcccaatcaagcgctcgacacgacgctccccgaacgggccccgcccgtcccgctcgtgcctgccgcagaggccccgctcgtcgggctcgccttcaagctcgaggagggccgctttggccagctgacgtacatgcgcatctatcaggggacgttgcgccgcggcatgacgctcttcaacgcccggaccggcaagaagatcaaggtcccgcggctcgtgcgcatgcactcggccgatatggaggtccggatcccaccctcctctttctccccgccgtcttcgaaggcgagcctcctcgctgaccccgcccttgttttaaccgcacacaggaggtcgagtcggtcggcagcggagagatttgcgctatgtttggcgtcgactgctcgtcgggcgacacgttcaacgacggccagacgtcctactcgatggtccgtccccccttccctcttgtacttacccacctcgcccataaatctctccctgacgccccctccttcgctctccgggtgactgccggcgcagacgtcgatgtttgtccccgagccggtcgtctcgctcgcgctgacgccgacgggcaaggacagcccgtccttctcgcgcgcgctcaataagtttacaaaggaggacccgacgttccgggtccatgtcgacaaggagtcgtccgaggtcagttgtttacgacgccgacttctctcttgcactggggggtcggagagctgacgccttgttgcctcttctcgcctcgcttgttacggtagaccatcatctcgggcatgggcgagctccaccttgagatctacgtcgagcgtctccggcgcgagtacaacgtcgagtgcacgacgggccggccgcgcgtcgcctttcgcgagacgattggccagcgcgcaacctttgactacgtccacaagaagcagacgggcggctcgggccaattcgccaaagtcaagggctacctcgagccgatggagattgacccggaaaagggcgggatcgacgtcgctttcgagtcgcagatcatcgccggcgcgatccctgcaggcttcatcccggcgatcgagaagggcttcaagcaggcgtgtgctaagggcccgctgtttggcgcgcccatcacgggtgtgaggtacgtgctcgaggatggcgcgttccatgcggtcgactcgagcgagattgcctttgtcattgccgccgttgggtcggtccgcgaggcgttcaaaaaggcggcgccgacgatcctcgagcccatcatgagcgtcgaggtcattgcgccgacagagttccagggtgcgtccccgcccttccgtccctctgtgctcgctcaaccgacctgaagccccccccccaacccctccctcacacaccgttgggcgtgggggggggcggctggcggagctcccttccacgagagagaggcagccagtctcggcatcggaatgccgaccccctcatccagcctgttgttgcagctcgctgacacctcctgctctcttcttcactttctcttcttcacttgctcgtcctgtctctggctcgctcgttcgttgcctttgcgatcccccaggcagcaaacggggcaaagactcaaagtgcgtctcctcgctctgtttcgaaagctcggccgcgggcggggccgccgatcccctctcgtgggaggggaggcggaggccaagaggggcccgcccatcttgcctttcctttccgactcgctcgaccgtcccaccgctggctgctgctgctgctgctgctgctgacgctgcttccgcctgccgttgctcgttccttgcagatggcccatcgtcgcggccgcgctcgagggccgaaacatcaaggtccgtccctccgagacgggcttgcgcgtcccaccctctgctccgtccttgactccctgacgcgtcctccctctcattgcgtccgcctcaggactgccgcaagcgctacttccactcgctcgcgcccgacctcaagaagggccgttggtcaaaggaggaggacgcgctcctgctcaaagggctcgacgagctcggcccaatctggtacaagattgcgcagatgatcccgggccgcaaggacgaccagtgtgcgaagcgctggaaggaggtgctcgatccgagcctatcaaaggtgcgtcgcggtcactcgctcgcttcaggctgctgaggagagctgaccgccgacgttgcgtggctgctgcagggcaaggcctggtcgaaggacgaggacgacctgctgcttgggctctttgagaagaacggccccaagtggcagcacattgccaagtcgatccccggccggaccggtctctgctgccggaaccgctggcgcaagttcaaaggcgacgagaaggtccacggcgcgctgctcgacctcgaggagcgccagcgcaagaccggcggcaacgccggcgggactcgctcgcacccgcagggcgggcgcggccggcggtccgtcagctttcagaccgagggcggcgacggcggctttgaggacggcgacgacgacgacgtcgacatggacattgacggcgagagcggctacggcggcggcggcaaccatgccgacacgccctcgtcgacgacgacactcggcgggccgtcgtcgcactttggcgagatcccgacgccttacggctcgacctcggcccactcgtttcttcctggcctcggcggcggcggcggcggtggccccaacggcttcgagtttttccgcccgcagctccaccacagcctctcgaattcgggtcaccatcgtgcgcttagcccaccgaacggcagaggcctcgttggcggcggcgccaacgacagcctgttgaagagtccacagatctcgctcggccagtcgctgggcggcccgtctggatcgggcggcggccatggcctcgcgccgtcgtacgccgaccacttttcagcccaggccggcggcagtcagctcccttcgctcggcgtcggcggcaaccacggtatcagcggtcagatcaacggcggcggcgcgctttttggcggcccgacctcgatgaatgggcaggaccacgccggcatgctcttttcgcaggacctcggtgcaaggctgagcgcggtcgagtcggcacggaacgcgacgggcagcggcgctggcagtagcaagcacggcctcttcaaccttgttcatcaagacccgtcgtcgtcgtcgtctgccccggcagcagtcgcagggccgtcgaatccaatctcgaccggcggcggtgctggtgcgctcggcggagggagcttgcaccggaccgacaacccacacgacccgatcgcccgcctgctcgcagccgagacgctcggcgggcccggcggcagcggtcaaggcgccgacggcgcgacgccttcctcgctcgcttcggcgagctcaatcggctccagtccggcgttcccgacaggctcgagccctgcgggcatctcgccctcgtcgctctcaaacgagtcgtttgcgacgccggcgtcggaccaccatcatacgggcccgaccgcgttccatccggccaacgggctcaacgggctcggaggcggcaacgctgccggcgggtcgaacgtcgggcagagcgttggcggtggcggaggaggtttgacggccagcggcggcgtcaatggcaacggcaacggcgggcccaacaaccaccatctcgcgcagggcagcctgagcgggagccacaagccgccgtcgcaccacgtcaactttgccgtcgaccacccgcacgaggagctcgaccagaacgacaatccgacttgggtgacgtcgttcctcgcctcgctccaccatccgtcggcatcgctcccgccgacggctctgaactcgcccgtttttaccggcgcttgggactcgggcctgttttcggccccgccaagccctcagaagcacttgtttatgcacctcccgccgatgctcgacgctgaggacctaccgcccctcccgccaccggccgtcggcgctcctgagccgcaccagcagcagtcgcaacagcagcagcagaacaagggcagtctccagcagcagcaacaacaactgcttcagcagcagcaggccttcctccgctcgccgggctcccaggccgggctcaactcactccagcagagcctccagcagcagcggtcgcccggcctccacggcatgttcccccagcagaaccagcagcagcagcagaacgcggccgcctcatcgtcgtcgtcgtcgtcttttgcccggccgatgccccagctcgcatcgccgagacgcgagcgctcgcccctccacccggtcccgacggctgcaggcggcaacggctcagcgtccgtctcagcgtctgcctctgcctcagcgacccctggcgcctcgggctcgcaggcgccagcaggagcagcagcaggctcgatggcgcccccgccggtgccgacgacgacgtcgggcgtcgccggccaccatctctcgtcatcgacgattcaccagttcgccaacgccaacggccgcgtgccgagcggcctcctcggtcagcactctggcggcggagtcggccactcacagcagcagctccagccccagcaacaccagccgcagcacctccaacaacagcaacaatcgcagcaacagcagcagcagctcgccatgccgctgccgtacctgacgtgggacccccggccagccgaggagcagaccaacgcggtcccgatggttctcgtcccgatgtcgatcctcgccgggctgattgagcgcgcgagcatggtcgacgccaacggcaacccgacgggcaagcacccgagcggcggcgccggaggcggagggagcagcggcagcaacagcagtaatccgcaccagcagcatcaccagctcgggcaggcggcgggaggagtcggctccggccagggccagaaccacctgcgctaggtcgcctcccccccccttgctgcgagacctcgccctctctcggttctcctaatgactccgccgccctttcttgacctctcgcggcccctcgagtcccttacgtcccagacggcccggcaaaccgccaaagacacgctcgtccgcttctgggatgtgctcgacatgctcgaagcaacgcaccgtgctgcgcggctcggcgggggcgagctgcgcgagcgcatgcgggacgaggtgagacggtctgtaggcggggcgtatgagggtggggtcgggaggttgagaggcgccttgggggcaaagtacgtccggctgacgccggaggagcttgtcggccggctcgagggcttcttccgatagggatggctgcttcggactctgggtgtgctcgagcgaaggggggggcaacaagatgatttagagcaaagggtccagagacatctgcatctgccaaccctcccgtcccgccacaccctccagcgcgcccgtgggctaaagcggcaccgaccccccaatcgccggcgcataggacacctcgtcccattcgctcagcaccgcctgtatagaccctgcctggtgcttgacgaacgtccacaggccagacttcccctctgggccggcgccgcagccgggaaggcgcagcagggggacgacagccccgttcaggatgaaccggacgtagtgctggccgttgggtgcgaggagtcgctcaaagacgaagcgggcggcataagggacgagggttgagacaacgaatctacgtgtgccgctctaagcttagcgcccggcagagcaaaagggagagagaaagagagccagaaagagaggggaggggagcacttgtggtccgggatcgccgtcgggtcgggcgcagagcgcaggtcgctttcggccaagacgccgagcgtcgcaaggatcgccacctgcccgtccattgtccatctgtatcgagcgtcgcgttgacgctcgcgccagggtagacgggttcattcgtcaggcgggtgaggagctcgttcacgtagccctgtattgtaagcggacgggcgggagtagagcagagtcagtatgaagggggatcgaaggagaacggaaagatgcaggcgcacgatgccggtcgctcggccgtagggcgagcctgcgccgtgcgagtggtacttgtcgactgtgacggaggaggagggcagcgacgtcagcaaaagggacgctcatgacataacggagacgaccgacggtcgcagtagtactcatgctatcaaggccaaacaagtttaccgtcaaacccgtgctccagaccgcgacgtgagcccaccggccaaatcaacttgcgctcactcgaccgccggttgagggagagtgagtgtcgaacgtgctgggcccacgagggcggctggatcagccagcgccgaagcgatcgacgtcggtcctcgcgttggcctgagaggatgcctgctgctttttaaagtcacctcgtcttcgaagggggggagctcagcgagggctgtgagcccctgcggcggtggcagcttattgattgagacggcagtcgagcatgaaggcgagctctgctgtgctgcgcgggcgggcgtcgggccgccagacaattccagcctgcaggcctggctgcccgaccctgtccctcgagctgtagagcgagatgctgcttaacagactgcaaaattgccaggcggcctgcctgcgtcccctggccggacgagcacgacgagcaagagggtcgtcactctgcgcctggcccgacctgcccacccgccgttggttgccagggcgacgttgggcgaccgtttttctctgcgcgcggccagcctctacgcccgcgccgccgccgcccagtcggattttcaaggccagccctgctcgccctctgctcttgccccttcgtctcccatccccctcaccaacctacccctcaagatgtctcaccggaagtacgaagccccccgtcacggttcgctcggtttcctcccccggaagcgctgcgtccgcggacgtggaaaggtccgtctgccgtcctccgctgtcgctgtcgtcccagccctcgctgacccctcctcctctcgctgccctctcgctcgcctccaggtaaaggccttccccaaggacgaccctaagaagccggtccacctcaccgctactatgggctacaaggcgggcatgacccacgtcgttcgtgacctcgaccggcctggatccagtgcgtccctgtgcctgatttgcttccagcgaggccctcagccggctgacccggtctttcctcttcccgcttggcagagatgcacaagcgtgaggtcgtcgaggccgttaccgtcatcgagaccccgcccatgatggtcgtcggtgtcgttggctacgtcgagaccccccgcggtctccggtccctgaccaccgtctgggccgagcacctctcggacgagctcaagcgtcggttctacaagaactggtaccggtccaagaaaaaggtgcgcctcccttgttgggcttcgctcatgtcgcagcagccgctgaccacctacctcgtcgtttgcaggcgttcaccaagtactcgaagaagcactccgagaacaacggcgcctcgatcaaccgcgagctcgagcggatccgcaagtactgcacggtcgtccgcgtccttgcccacacccagatccgcaagacgggcctctcgcagaagaaggcgcacctgatggagatccaggtcaacggcggcaccgtcgccgacaaggtcgctttcgcccagggccacttcgagaagccggtcgagattgcctcggtcttcgagcaggacgaggtcatcgacatcatcggtattaccaagggtaagggtttcgagggtgtcaccgcccgttggggaaccaagaagctgccccgcaagacccacaagggtctccgtaaggtcgcctgtatcggagcctggcatccgtccaaggtcatgttctcggtcgcccgtgccggtcagaacggtttccaccaccgtaccgagaagaacaagaagatctaccgtatcggcgccgccggcgacgccaagtcggcctcgaccgagtccgacatcaccgagaaggacatcaacccgatgggcggcttcccgcactacggtgtcgtcaagaacgacttcctcatcgtcaagggcgcgaccgtcggtaccaagaagcgtgcgctcacgctccgcaagtcgctccagacgcacacgagccgcacccacctcgagaaggttacgctcaagttcatcgacacctcgtccaagttcggccacggaaagttccagaccaaggccgagaagtcggccttccttggccagctcaagatcaaggcttaaagcggcatcctacggctcccgcctctcttgcttttgccctgctcgtcgtcgacgacaggccccgctggagaaggccgcctcggcctcgctcgctttcccagcccttttttcttgccttgctctgtgatgacccccgtcagagcaaaagtccgcgcgccctcgtcgattgaaagtcgtcagcgatcagggaagggagaggaagaaggcgagggagtcgcatcgctgcgtttcaggaaggcaaacggcgtgacgcaaagccttgtcgagtcgccgtggcccgcctcttgctcaaccttcgaccgcaacccccccccggcggccgcggccgcggccggcgcgtgccgaggcgcgacggcagaggggcggggtccgtcgtcgaagggcgctctcgccagctaagcagcccagcgcacacccgagcgagaatcaagaaggaaggcacggaccagatggccgtcatgcccatgtcctggatgtagtcgagccggtcaacgatcgaccggtagttgccgccgcaccacgtctgggcattcgggtcgcagacctccgggatcgggttcgtcaacgctggcgcggtcgccgagggcggcgcgaagcggtccgtcaagagctggtagattgtccggcccttccagtcttcttttgaggcagcgaggcaggaggggaggaggaggagggcggccgggaggagggccgaggagaggcggaccatcgcgagcgggctgagggcagcgaggcgaggctgtattgtcgagcgagaggagaagagattacgaggcagagggagcaagcgagaagggaagggcgacccgagaggcagacgaggtgcttgaggcaaagcgagcagaggacgacgcgccggtcaatcggtcggtcggtcgtgtgtgttgtgcctcggaggggctggctgtgcgggttggcgaggaggaatcggcttcgatcggttgggaggttgtcggtcggccgagagggaggaagagtacactcgaggagaggggccgagggtgtcgagattagagagttgcttgaggaagagggaagagagagagagagaagagaggatggaggatggagggaaggagcgacgcagggaggcgcgcgggtccttcttggccctgccgagcgaccaacaccgacgaccggctgcacgacccaagccttgccacgccagaccagccagccgacctgctccgcctcgtccggctgccagagcggcactctaagcgtcttcctttaagcaaggcatcaatccagctacagctctcctctcttgagcaggggcgagcgaggacttcagctcgcctctctcgcgcgcagtcagctgttcagacgacccaccgcgccgccggccggggagaccaacacgctcccgaagggcgagcaaagaacggccggcgagcgaaccgatgccagcagagcgagggagcgtctggcttcgctcgaggagcgtcctctaatgaatgcatttccgtcatccatcttcagcagcaagcagcagcaacagccgtcagggagcgagatggacagcctgctgccaggctcggcagcctcgcccccgaacggccaccccgccccgcacctgtggggaaattttgatacattccaaactctgggctttcgacttgggtttcgccggaacttgctcgcacaactgcgcccccttgcctccttgtcgcccacctctctcgcaccgacctccgatccctgctcctcgcacccgtccagctcgcaacatggtcaaggaaacgtccgtcgatgcgccttcctttctctgctcgcgaaggcactgacgcttgctgcctctcttcgactcgctcactcgcctcgctcgtcgccggccctttttcaccgcagcgcttactagtcagccccgctcgccataagagcttccacgtccttgcctgccagtcgctgaccttattgtctgcttggcctgattgtgcagcgacctcctcggcgctcagccgaccgactcggaggaccagctcaagaaggcctaccgcaagaagtgcgcccttccctgcctcctctctccctactcgagctcacgctcagcgagcacgacagcgaaccaaccgactgacgtctctccttttctttgtaaacggtcgcgcgcttgctcagggccctccggctgcaccctgacaagggcggtgaccccgaggcgttcaaggaggtgacgcatgcgtgagtccatcggctctcgactcggctcaaaaggcgacatacgcgcgcgcggggctgggagctcgggtcggcagcgatacgtcggcttcaggggcagctggctggcagtatgggagcccgtcgtcggagcgcgtgcgcctgggtcgatcggcgcatagagtggcagagcgcggccgctgtcgcagcctctctcgctcgcgcatcggcaagttgctgactcaacgccctctctccccaccagctacgaggtcctctccgacccgcagaagcggtcgatatacgaccaggcgggcgaggccggcctccagggcggcatgggtggcatgggcggtggcggcatggacgcccaggacctcttctcgcagctgttcggcggcggcggaggcggcggaggcgtgcgttcctcttccaatcctctcttctcgtcgcccgcaggcatcgcagctgatgagtttcatcctcccgtgtcattggcagcctttcggctttggtggcggaggccggcgtggtccccagggcccgcgcaagggcaaggacctcgtccaccgggtcaacgtctcgctcgccgacctctacaagggcaagatctcgaagctcgccctccagaagcacgtcctctgcaagggctgcgacggaaagggcggcaaggagggcgccgtcaagaagtgcgggagctgcaacggccagggtgcaaagattatgctccgccagctcgggccgatgatgcagcaggtgcgtggcccggctttgtctgcgctcgagcgagcagttggctgaccccattcccttcactcgctctttcaggttcaggtgccctgcaacgactgcgacggcacaggcgagattattgacccgaagcacaagtgcaaggtctgcaacgccaagaaggttgtctctgagcgcaaggtgcttgaggtccacatcgacaagggcatgaagggtggccagcagattaccttctcgggcgagtcggaccaggcgcccaacacgatcccgggcgacgtcatcattgtcgtcgaggagaagccgcatgagctcttccggcgcaagggcgacgacctcttttgcgaggtgacgatcgacctcctgacggctctcggcggcggtgagctttcgatcctccacctcgacgagcgcgcgctccacgtgacgatcaagccgggcgaagtcgtcaaagacggcgcgctcaagcggatcgctggccagggcatgccgtcttacaggcaccacgagatgggcgacctctacgtcaagcttaacgttgagttccccgagtcgatcccgaaggagctcgtcaaacaccttgagaaggccctgccggcccggacgccggcaaagacgtacccgtcttcgatccacgttgacgaggtcggcctgagcgagccgaccgagcgcgagaaggccagccaccagaacggcggcggccgcggcggtgaggacgacatggacgacgacgacgaggagggtggaggaccccaggtccagtgtgcgcagcgtgagtaccctctcaaaccgcttcctctcgcacacttcctccgaccggcccactgacacatctgcctgacctacctgcccttcgccctctcagagtaaagcccgcccaaccctgtcgactctcccaaaagctctgcccacgcaagccgtctcttctcgcccctcacgttacaccacagcagcagcagcagcgacggaacagcacctcctcgaaggaattcaggacggcgcacgctgtctgaccggtcttaggcttcgcttcctcgtgtggacgacagtgggccacaggggcgacgttcggcaatggcgcgtctgaatcgcatgttcgagcattgcctcagaaaccttgctgaggggcagcctcggtgacctctcgagtagcggtgactacacgccgtacgtcgcaagccaaaggccgatttcgatcgagcagaagaaggcgatgaggttgacggccgaggactctgcgagatcgagaggtatgggtttagctcacgagcattgcacgctgacacagaggctcaaggaaaaggacgaacggctgtgcagcatcttgaactcgctgttaaggcgcttgagcgcgggcgagatctggcaacgagcagatcgtcgaggtcaggtcagcgagcgaagccggctgcgcacgcatgcagggccgacgcacgtcggcatcggtgcagctcttgccctcaaccttctcctgcttggctcggtccttcatgacgtcgacgacgcgagggccgagggcctggccgttgtaagcgtgcgccgccaggtggagcatgacgacgaccgcctggagcgaagagggcgtgcggaggttcttgaggctctggtgcggcaggtggtggtagagctgcgaggcgacgaggacgagcgacagagccgagcagatgttgaagtagaccgggaagagcttgttctgaagctgacggaaggcgagccgggctgatgaaccattgcggctgggtcagcggcttgcaggggaccgactggagcttgcagggagacgacgcacgcagcgccttgaagcctgtcacgccgacgacggcattgtgcagctcggtgccgaaacaggccgcccaaacaaggatgtggaggctccggaggttgaagagggcgccgagcgaggcgaggtcgacagtcaagggatacattcagagagctgctggcgaggtgggccgagccatcggacggttgaagagaagtggtcagttcggcttcggcctttgagctcggagcaggcagacggtcgcacttgagagatggcggggtttgcgatctgtgtggctcgtgagagacggtcgagtggatggtggtaaggagacgactcgtcgcgatgctggagcttgccagccgggcggcgagtttcgactgcagttactcgcagtcgccctggaagcgtcccccccccaaccgacacgtcctgtccctgcctgcggcagcgcttgtggattcagtggagcatgtatattgaccagcaacagtccatctctcaggcgcacgccgtttcgagggcttgctcgatgtcggcaatcaggtcctcgacgtcctcgagaccgacgctcatccggatcagactcggcgtcaggccactcttgcggcgctcggcatccgacagcggcgaagtcgacatcagccagggatttttgacgagcgactcggcgccgccgagcgactcggcgagggtgaagagcttgcaggcagcgatgaacttggcgcctgcagaagaaggagacgccaatgtcagagccatgacgagggaagacgagccaattactcgacgtaccagcctcgtctgggcccttaacgcggaagctgaagacgccgccgaaagggagaccgagcgtctcccagccgttgcgcttggcgagatccttgcgagcctggggcgtcagcgcccgcttgacgcgctcgtgatgcggatgtgagctcaggcccgggtagaggacctcttcgacgagcgggtgcttctcgaggtgagccgcgatcgtcagggccgagagtccgtgctggagacagcggagcgagagcgttttgatcgagcgcgtgagcaggaagcagtcgaacggcgaggggttggcgccggctgccatttggagccacttcatgcgttttccaagctcttcgaggccctcgcgcagaacgacaacaccgccaacgacctggagatagattagagcccgcagtcagtagagtttgcttacgcgaagtcgtttgcgtcgaatgggacatacgtcgctgtgtccgccaatgtactttgtggtgctttgcatcacgatgtcggccccttggacgagagggttgttgaaatagggcgagccaaaggtgttgtcgacgacgacgaacggccgggacgggtgcgacttggcaatgcgcgtaatattggcgatgtcggcaacagcgagaagcgggtttgtcggcagctcggcccagatgacctgcagcatgcaaaagccggctcagtcaaccgattttaaacgtagcgcagttgtgagagggcaggtaagcgggtcgagacggacctttgtgtcgggctggatggccgcatagatttcgtcatctgtggccgtctcaaacgggaagaaggttgtcgaccagtcgtgaaggggcttagcgatgtcgagaagcgcttcctcggtgcctgtagtcgacaaggtgcgctgtcagcgtcttgcgagcgcatttgagacgagttgctgccgagggacgaaccgcagtagacgccgcggatcgcgaggcagtggtggttcgtcccaagagcttgaatgatcaggttcgtcgcagccgtgcccgaggctgtcgcgtaggccgatgcaccatgctcgagtgacgccagcacgctctcgagcgagtccctattggggtttgcgtcccgagaatactggagcgtgggcgagcacgagcgaagcgggcgggcgggcggtcagcgtcgaaccggctcagacacatgcccgaacgacgtacgatgtagcccgcggctggaatttggcatgcgataccgttaggacgagcgatttcagccagggggatgtacgacagtcggcgctggtcaagcgactcacgtagcgggacgttcggctcaggctgccggaacgtcgaggcgaggatcagcggctggacgacggcgccggtgacctcgcagggcttgttgcccagatgaacggctcgcgtcgaagcgccgagagtgcaggagctcgaactggcagacatgcttgaggtacgacggtggacgaaagggttggcgggctgagacgggcaggctgctgcgggccagacgggaggtcgtagcgataaggtcgtcagcgagcagaggacgagatgaaggcaagtgcgacttcttcctgcggtactcacgacgagtaggagagtacgggataggagcctatcgaacagtcagacggccgccctgaagccctttgaggagctgccgtcccgtcgctgctgctgctgctgctctttaacgccttccgcctgccggccgccgcctcattgtcgtcgtcgtcggcgggggcgccgccgtgctgcggggggtggctgctcgagccggaggaggagggaccggcatgggcctgaaaagcaggcgagtggccggccgagtgggccgcggcagccgaagtcggtgcgagaggggacgaggccgtcgacgaggccggcgtcggcaactggtgctgctgctggtgctggtgggcgtacctcggcgcagcgtccgagggcgacgcgaccgagtgggccgcccccgccgacgacgacgacaatgaggcggcggccggcaggcggaaggcgttaaagacgccgtcgagcgtgtgctggagctcctccatctgctcaagcccgacgtcgacgttccactcgaggtagccgagcatctcgcgctccatctggttgatctcctggagcgggaacatgttttgggcgacgatcgcccatgacttgttcgagtaggtgtcgtcgcagttcatctttgagctcatcatgaaggccgactgagaagagaggagtgaatgatcagagaccgttgaggctggctggcaagcatcgcccggctgcagccgggggtatgctcgaaatcggcggaggaggaggagggggacgcacgatgaacagccggtggccggacgagccccgggcggacgggtagcgtgccttgaggcgggacaggaggagcagtgcacaagtcgtgacggacggaggcagttgggtcctgcatagaggccggaaggcaaagtcggttgggaagggagcaaaggagtcagtcgaggaggggatgcgcgcctctgaagcttccggcgagctaagcatgcgaagagaggggacggaccggtagagcgcataggcgacaaagttggcgagcggaggccgggcgctagacgttgccgaggcggcggggatgttggggcagtggaagaggtgcatgatctgtgtttcgaaaagggacaagaaggtgagcgggctgtgagggacggggcgggggccaaagagaggaaggcggtgagacgccgaggccggcaaacgtcccggccggctggtgcaggcggcggcgcgcgcgggccgaagcgggccctgactggtcgcagctcccgagcgcgaaggccaagccagacggagcaagagagaggagggaacgtacgtagctggccgccgtctttgccgtctcctcgtggccgtaccacttgagggccgcctgagggtcggcctggccggtggtggacgcgcacgccgatgacgaggctttgctgctgctgctgctgctcgagctggcggtcggcgacatggttcaggcgtcgggtgaggggcgataggtcgagagggttgagaaggcgacgtcgggaagtggtggtccgagaaggggagccagtcgcagctgatgcgaaagaccgttcgcagagaagaggagggcggacgacgacgacaacgagcaaagggaccagcgggcgcctgaaggggggcgttcgagggtggtcggagtgcgagcgggggctgcggggctctttttttgggtcgggtggtcgaacgacgacgacgacgacgacgtggatggatgggatgggagatgggagagagagagagggaagggaggacggcgaggttgatggttggctcgtaagaggggaagagggagcgagagctggcgttgcttgcctcgtcgacatgctggctggcttgtcctccgacctcctctcgcggccgtcttctccgtccgcccgcccgatcgacaccggcgcgaccgacgccacgcggtgaatgctcccgccttccccgagcggcaagagaccacgcccgtccgacgccgagcctgcccgaccctcgcagtctctctcagccctgcgggtcctgctcaagcaggcgcgcgtccgtctggtctggcagcttgctcacctgtcagctcgtctctcgagaagcaagcgggtggtgggcgccccgaccgtgcccgactcaccaagccagccctctactgcgcccgcaagcggcctccactttctctctctctctctctcactgctggtcgcaagccgggcttggaaatcgccggtatcagagggccgaacagaaggcaaggacgagcgccatgcgtcgtcggtctgctgctgtgcgaagcagcgagggcccgcccgttcaagccggccttcctttcctgacgctgggatttttcccctgcccagagctcgggtcgggcgtttaagccgctccgaccggacggcgcggtaacggcaaggaaggggccggtccaaagcttttgtctctgaccgcaagagtcgcccagccagacttggcccccggagagagcccgagcccgagcccgtgccagaaagagagagaccatccacagcccagcccttttgcccgggccgtgctatacgcggacgaaagagagcatgttggaacgggtcagcgagggcagtcagcagccgcgacagcagaacgagtctcgagcgcagagggatagacggtgcagaggccggttttccgtctacgacgccccgcctcccgcaacgccgcagcaacgcctctctgtcttccctattcttagagcccgccccgtcgggccgaagagcgccagctgagcaggcaggacaccatgcgaagaggctaacagtgagtggagatcgagctgaccgcctcctccaacagaggccaaccaacaggaagcttctttcggcgatgagactgaattgaccgacgtcggtcggtcgagcgggccggtatgatgcgagcgctccaagagatcaagacgggtcagcagaggagcaaagacgacgcgagactagaggggtcatgcagcggtttcagggggggggggggggcagccgccaagaggcgacccgagccgctcgtaggcgcccatcctggcgttgcgggccgggctcgacgggcttgctggcgcgacccggcagcagagcagagcaggagcaaagtgggtgagggtagggttgcgcctccatcccagtcgtcggccgtcggcgcgtttctcctctctctctcgcagtccgttcgtccatcaccctttcttgcctggctcggcggccgactggagaaagctacgcggcatctccgagacgaggctctgctcccgtttggcctgcttgggcagggcggcaagtgtgcggcccgtcaaaggggcaggagggagccgacgtggctttgggggcgcgcgcctgatgatgaggagccgacccgaacaaagaaggggagagagagagccgagcagcgcagccggtcgcgcatggacgcgggtgcgttatccgaggcagaggaggagcacgacggtcagctcagcagcgctatgctccttgagcacgtcagggtgaaggagccgacgacgacgacgaccagccaccacggcccgccaccaagaccttagcaggcgtctccgttcggccgcccatcgtccagcaagtgctgcttgtgctgaacccggtcgagccagcaggcgcgtgccctgcgctaacggctgaccggtcgcggaccctcccccccccaggtcgagccgacggtcggcgcgaacgacacgcccgagccgccctcgccgcggaccgagaggtggtcgagcgcgagggcgagcggcggccggtggggagggaggccgcgcgacttgaggagcgcctgctcggcctgcggatcagacgagacgggttggagttggtcagcattattgggcgctagggagggactcggttgggtgaggggctcgcaccttgatcgccgacgcgagataggagatgttctcgtctttgccctgcgtcacagcagagtcatatgacgccggcgtcggcggcccgctgtccgactcgtcgtccaaagacgccgatctcgaagatgaggtggtcggctttgctgcagcgggcgaggaagcgtcggccgcggcgattgtcgcgtccgaatcagctgaggaggttggaggcggagagttcggagccggaagggcgagtggccggccgagggtgagctctgggagcggggccgacatggttgatcgggagagtgctggatgggctggaggagggaggaggtcaggttgagggaagaagcgccctcggcatcgagctcaagcacgatgctttgaagggcatgcccctccccgacgacttcagcatcgtccgggcgagacgagtccttcgatcgtcagacgagcaaggggcccgaacaaccgggcccgccggctggctggatgatggtgttcgggttcgggcatcggctgtcgttcgggcatcgtgcgcgcgagcgcctgcgaaaggggctccgacgtccgggcatcgcaccaccgagacgtgacgagggcgaggcggctgcaacacgaacgccatgaccggctagcaggcgaggcgaggcaagccgggctcgacggcaagccgatttaccagttgctcagcagctgctaatggaccggcagaggctgcgtgctcgtccggcctcgcgcttgacactgcggcttcgacgacgtcggccggccagtcgagccaaaataggcccagtctttgagttgctcagcttgatcagtcaggaagcgagctcagccgtccatctggcagcccgctaactgctcggcttgctacctgcgaggatagacagaaaggaagacgagccgtctgccttgcgagcccccctccgaggccagcgatgcatcacgtcaggtctgatgcattctgccgctgagtcgcgcgcgccgcactgcaatttcgcgccgccgccggccgcccgtccggtcagacgagtcgacgctgcctcgcccgctggcccttctctcccgtgaagcaccttccccaaccccctcgtctccgtctccgcccctcttcttcttttcgaagactactaccctttcgtcggcctaaacccgccggtctccaaaagcccacgtcatcgaaagaaaacccagcctcctcaaaccccctccagcgagttcactggtttaggtcgagaccaaaggacgacaccaaaaaaaccgtcagtccacccttcttcctttcgtaacgaggagaagcagtttcgggcggacgcatggcgcagaccagcagcctgccgtgcgtccaggcccgcctgggcgtactctgcttgtggtctgtccacagtcgggcgagccgtcggccatgctcggcggtcggcttgtggcgagtgggcagacgaccgctctggcagaagcggcgctcgactcgagtcggtcgtttgcactatccttcgcagctgttcgccggcgccaaagcagcacgagccgagtgctgcagtgttcggtgagggtctcgccacgtcctccgcccgcttcgcttctcggatcccgactctgccgcaggttgactgacgtcgacgatctttcctgctccttcagacatcagtaacgacccttcccctctcctcctttcgaaaactttttacaaggatgtctgcccgtgcgtcctccgctttctgtgctggttgcacgccgtgccgctcgggacagaacactgacctctccggcccgctcttttttttctccctcggtgcagcctccgagacgacccctgccgctgaggccactacccctgccaaggaggtttccaccaccgaggctgcctcgaccgagtccaagaccgagtcgtcgcctgcgccggccccggtcgcgctgcccgttgccgcgccggcccagcccgccccggtcgccgccgcccaggctgctgccaacgcgcccccttcggcctcgctctacgtcggcgagctcgagccgaccgtcaccgaggccatgctgttcgacatcttcaacatgatcggccccgtcgcctcgatccgtgtctgccgcgacgccgtcacccggcgctcgcttggctacgcctacgtcaactacctgaacgcggccgacggcgagcgcgcgctcgactcgctcaactactcgctcatcaagggccgggcctgccgcatcatgtggtcgcagcgcgaccctgccctccgcaagacgggccagggcaacatcttcatcaagaaccttgacgagggtatcgacaacaaggccctgcacgacacgtttgccgctttcggtaacgttctctcgtgcaaggttgccgtcgacgaggccggcaacgcccgcggctacggtttcgtccactacgagacggccgaggctgccaacgacgccatcaaggctgtcaacggcatgctcctcaacgacaagaaggtctttgtcggtcaccacgtctccaagaaggagcgccagtccaagctcgacgagatgaaggcccagttcaccaacgtctttgtcaagaacctcgccgaggacgtctcgcaggacgagtttaccgccctcttcgagaagttcggccccgtcacgtcgtgcgtcctctcggtcgacgacgagggcaagccccgcggctttggctttgtcaactttgagcagcacgagaacgctaagacggcggtcgacgagctcaacgactcggacgtcaagggcaagaaaatctttgtcgcccgcgcccagaagaagggcgagcgcgaggaggagctccggcggtcgtacgaggcggccaagaacgagaagctcaacaagtttgccggcgtcaacctcttcatcaagaatgtcgacgacgagtgggacgacgagaagctccgggccgagtttgagccctttggccagattacctcggccaagatcatgaaggacgagaacgcccgctcgcgcggctttggcttcgtctgctttacgacgcccgaggaggccaccaaggccgtctccgagatgaacggccggctctcgaccaacaacaagccgctctacgtcgcgctagcccagcgccgcgaggtccggcgctcgcagctcgaggcccagatctcgatgcgcgccaaccagcgcatgtcgatggtcaaccagatggccccgatgggcgcctactaccagccgggcatgcccccgccgggcgcctacccccagcagcgcggcccgcccccgatgggctacgctcagcagccgggcatggtccgcccgcgctacgcgcccgccccggccggctacccccagcaggcctaccctaacataagccagccagccgtcatgtccgcctctccccctacctcgcccaccctcgtgtggggtgtgtgagcgcaacggacgagtgacagctgacaccgcgccgtgcggaacggtcagtcgaccaaccgacgacgctagcgagcgctctcgtctcccggttccggttcggctcgagcatggagtcagaccgctgacgcgaggcgagttcgtccatcacacccctcgcgaggcggggacgagacaagcgggccggggtgacgacgatgacgggcacaggggcgcgctagcctgcctgccccagtcgcccgcccggccgctcgccagtgcgctccgccagactggcagagttgagaacgatgcggccggtcgaacggtacgccagcgagcccccaaaggccccttaagcaaggtcaaggaaagacaagaagcgcgctagagaggagaggtcgttgaaggggagaagggggggagggaggaaggacggaccccgagtttttgaagcggtagaaggccgagttgcgaccgacgtcggcagggcccttggggagcttgctgtagagcgagacgatacgctccatccgggtcgaggtgccgccgccagactgtgttgtgccggaggcgaggcgtatgcacgagaaaggtaggcggaggaggaaggaggagagaagggcgcgggcattagttggagtgcttggaacagggaagtgcacaggctgggacggacgacggaagccggagtggcgatcttgggcgggataagggacgagatggccatcgttgctagaaaggaaaggaaggagggaggacgagcaagaggagggagagggtcggagcgagcagcagcgagatgcagctgacttagatgattgttgacaagtctggggtgaatcatttaggtgagtgagcgagtcggcctcggcccgggggagcatctcgacctttactactgccagtcaagtccagccagcctagcatgcagcccaccctcgtcgcactcgtcagttccctcttatcccttagggcaagatagagaagcaagagaggaggctgacaccccccttcgctccttcccgcgctcgcaaaggccggccagcgccgctatccgttcccgcgccgcgtcttccatccggcaggtccgtcgccctctccccttctctcgctcgcggtcgctcgctttttcttctcctgctcggtctctttcactctgcggtgggagttctggtcgggcggtgtgctcgctcgctcgtttggcccgccgtggctggctcgctggcgggctgtcatcgacggcgaaggcggccgcgctcgagcacgcagccagccaagccaacccgagcgtcgctcaatcgtcgacccacccgacggtcgaggagcgacgagggccgggcgtgcgtgtgtgcgcgtgcgagtgagctcgaccaaccgagcgagcgagcgaacgggcgggcaagagggatggctggctggcgggtcggccgctgcttgctctgcttgctcgccttgcttgttcgggcgggcgtcatgcgtaagagcaagctcgcgagaacgtgcgtgcgtgcgtgaggctggccagctagccggctggtcggccggggggttcgttcggctcacggacgaggtttaaggtcgagcacccgtccgtccgtccgcaccctcacgcacgcaggcagacaggcttccgcccgggcgggcgggcgaacgaccggaggggtcgaccctttccgttcgctcgcgagcgctcgagaaggcacccgaacctccctgcccgcctgactttctggctggctggtggacgggcaggctagggctctcgcctgttcgaagagagagagagggagcgcttgcacttgcgcttgcgcgcgcggtcggtcggtcgcgtgcatgcatgcatgcatgcaaacgagtgcgcgaggccgagcctgacccgtcaaccgacgaccaacggcggccgtctgcctgcctaggtggtccggtagttggtcggcgtgcgtgcgtgcccgcccgcgggctcgtgcgcttgcggcttgctgctcgctcgctgctttacttgcggcttgcgtgcgtgcatgcgtgcgcgagagggtcggacggacggacgtcgctcgcgagacgctccgagaccgcccgccgccgctgctgccgctggctggtgaggctgtgaggtggcgcggcgccagctcccctgtctggctctgctggcggacgggcgggccggacggtcgagagcgcgcgagggagacgcgggcggagcgtcgtcttccgacctcgggttggcggtctgggagtatgatgaagaggagagcttgcctctgaccgcccttacccccctcctccccccggtgaacaggccactactggatcggcaaccgccacggcctccgcaatacgctcatcatcaatgccgcgctcggcctcgtcctctacacggtcgtctggccgtggtgcaaggacaacgaggtccgggtcgtcccgccccggaggccgacgttgggcatgacatatgcgggtcagtacaaggacgacccttacggcgagaagatggtgcgtttcctttttcgctccacctccccccccttcccggcactttgctttttttgggcgaaaaggactgacggatgtttgaatcgcacgacgcacggatgcgcagttcgccggccaggtgccgtacgtcccgatgaagcacggccactagacgggcgccggtgccggcctactcgtctcgtcgccccccccccctctctctacctccgctcggtccatctcacgctccgcattcggctctctaccgaccggcctgtcgtcgacccgctcgcttgctcgctcgctcgactcgaacagagcggaaccagtcctccaccctggccgacgattccactctccgtaccgccctttacatcctacttcatcttccttccgctccctcgactctgctttctcgaatgaactcgcttttctgcctgcgggagtctggtctgttctggtctggtctgtcgtcgagtgtctgaaagaggggcgaggttgacgcgtgcgtgcgttcttgggcggagcgagcggtgcacgagacgagaagggtcctacgagatggacaacactcgtgctgaggcaacgaagctctactccccttccctctcatccactctcggccctccgctcgcgagaatgcagttctgcaagctgctcatgcacatcgcgagagagcgagcgtcgcgacgaccgcgtcgcgcgcgcttcgatcgctcggttcggctcggacgcgacgggccctctctgtcgtcgttgcccttgcttcgccgtcgtacgatcagcatctctttgtcgaccccaccctctctcctcgttcgagggacgacataagagcagccgacggccatctccctgtctcttatacacatctgacgctgccgacgatcttacgcgtgtagatctcggtggtcgccgtatcattaaaaaaaaaaaaaaaaaaaacaaaaaacaaataaaaaccctacacacacaaaaccgcagcagaaagggtgtcagcgcatggatggctgagtccggggcttggcaggacgcgcttgcgaaagggaaagggagaaaggcccacccagctgatgggcgcgggcggcgtggtccgttggcggccgcccttgcgacgtggcgggggcgggcgtctgcaaaaaggaggcgatgagatgtcagctcgatggggccggcggcgtgccctattgcaatcaccgctatgattgagttgggtccataggtggggggtaaagcagggggaagagcgttacagtgagagaaaagtcgaccacggaggtcgagctcgcccgcttggaaggcaggcggcgacctgattgagcctcctttcccatagccggagtgtcctttcggcaaagacaactgagtctaaagacgattcataattcgcccgcccccgctccaatgcccgatgggccgtttcatgggggggggggcaatgaggcgagaaagaagttggcctactgggaggccttcacggaacggccaggttttagacacgaatacctttgcggccccgaagcgtgaggccgttctcaagcatatcggcgccggccactcgattctggcgacagcgaggacgacagatgcctcggcttcgtcttggacgagggacttttgctgtcgtttgccaatcacggaggcaaccgccatcgtcggcggcgcctcgatcaactccgacgcgcctcgatcgtcatgcaccatcacggtcctcagtgccagtggccacctgctctcaatggtctgccacctttaccagggccacaacgtctggtgtggcctggacaacaccggacgcgcagtattggagttgttctcgtcgtctgagcagcaggcggcgcgcggcagtaataagggcgttcacggcttcgaaatcattgacggcttgcctgtccggacggccgagcagaaccgccaggtgaggctctcgctctcatgctccgcgatccctcttgtctcggctttaaatagttccctctgcctccggcccgctgctgacccagcttgtcaccaaactgcaactgactgccaacaggaagaagacagtcgacgcttgcccgccgtgtggcggcgaaactcgttatgaagagctggcccatcttcctgtccgtgcgtgcggtgaccaaaggctcaccgtgctcccagttttgtagagtctccagcggtctcagcgcccgttcaacagctcttaggagacttagcacatcacccggctcgtctacgccaaaggcttttcaaccggggtaacatttgcggcaaggacgatcgacgatgacccaaaggtaggcgatggactggaggacctcataaggacctttgaggttctacgcgccttgtacgaagccggaggcgaacgtgcggtgtcgacgggcggcctgactcctaaagttgaagcgtcgagtccattggcgtccggcgaggcgtgacgtcgggggggtcgaaccggacgaagaccttgtcgatgtgggccttctgtctgatgctgatcgtgccaactgaccggtcccggctaaagtccatgccagggagctccccagggttgagcgagcctcggttgtcgacctcgaattcgcgcccgatgaccacaaacatgttggcgacgccttcagccgagacagccacgaccaagtcgtcgacgtacagcacgaggaggaccttctggcccttttgctaaccgaggaaaacatacttgtcggcctcgatcgagaccatgtcgatacgagtgaggaacgaggcgatccagtcgtagaaggccttgggcgactgacgcaggcctcgacggccaaggtgatgtggtagaggtcgtccggcgggactgcgtagccgggcggcgaggtcatccagaccggctcctcgagcttggcttggaggaagaccgttttgacatcggcttaatggatgctgagttcctcgttagcaacgatcgagaggaacgtccggcgtgacgtgccgttagcgacgggcgagtaggtctcgccaaaggcgccgtcgcgctgctcgaagccgcgagcgatccagcgggccttaaacttggtcacctcaggatccggcgtcggaccgtaggtgaagactcatcgacccgaaacgaccgccggcaaaggccttgacgcgtcggaggggcggacggtctagacatcgagcctctcgaactgatcgagctcggccgtcttggccgcctcccactcgacccggtacggccccatgacggccttcttgtacgtcttgggcggcgcagccggtggtggaagggagcggaggctgatgagggaggacgttgacctgatactgatcacggaaccgagctggggactgggtcttgcggccggagcgacggatggcggtcagagaggggtcggtggcaagaaagcgaggtactgccgtcagtgccggtgccggcataggccgacggactgctgacgggatggagggtgtggccgctggcaccggctcctcctcctcctcgcgcatctcgtcctccgacaagacgcctgcgtctgctggctcattgcaggacgccgtcggcattggacaagacggtggtctcctcctcctcctcgaccgttaggccgggctgcgcctctgccggctgcgtcgagctgggctgattggccgcctggtccatgtcgacgccgacgggcgttgctcttgccggaggcgcctcggctgccattgggctgctccgactgcgggcgggacccttggtccggattatccagtcctcgtcgaagacaacgttccgggagtagacgatcttgagcgggctgcgcttatcgaccaaacggtacgtcttgttgccgaatgcgtcctcggccgggcacatgaaccagcaaggcactgacttgttcttgtgctttttgtgcttcgggtcgtgggcgtaggccgtcgacccagagacccgcagccggtcgaccgacggtggcgtgccgaagcaggcctcgtgccgagtacggccagtcgacgtgcggatcgtccgggcgaggatgtagagtccgttgatcatatccctggaacgctgcccgtgctaccctttttcctgtacacaggcccagacaatgagaacagaggaggagttcgctgacaagttcgacagcctcttcagcgaggtcggttactccacggcctactaggtcgttctgtacaacacaaccagcgagcagccagagaaggtccccctcgccctcccagccctcgccctgaacgccaagactaagacgacggctagcgtcccgacgacacgcatcgccgactcgctcttcggcaaccggccgacgaggctccacgacaagattggcgctcgcatccgggtcaccttcccgcgcaggacccatcctttcgaactcgcgtgatccagcaagacttccgccagatgcgcggtgagcaagtcagtcgggaggccggttggagcccaccctacctgacgggcaccagactggaagcgagaggtgcatgctcgcgccctcccccactgcgttccctccaagggtcacctcctgccccggctcgacaccgacgaccggcccctccttccctccctcaatctcaagcttcgcgaaccccccctccatcgtctccgctgccccctgcgagcagctcccgacaaacccctcgcgctcgacccagctccacaaagcctgccattcgagtccctgagggagcgcaggctcgcccggcccggaccacgccgccccgcgcaagacggccgagtcaagccatgccgaatgccttgcagcgttcagcgcgagactcgccgctttctcaccgactgccgacgaggcggtgaagagttgggggagggagccaagaagggctgaggaggagagctgctcgagtgcggctgcggaggagaggaaggacgaggggctggggaaggtaaaggtgtaggaggtgcagggttgcagggcggaggagggcgaagagaggagcgactgaagggtcgactggtgcgcagcggcgtgctggttgactagcggaggtgacaaaggtggagtatgcgacaggattagtcagagagtcagtcgtcctctcaatgaatttggaggaccgctcgtgaaagaaagggggggaggagggaccaactctggacgacccgcttccggacccagtcgaggtagccatcccgctcaaagtcgtcctgtgtgaaactcgcgagcgcgtgcgagtagagggcggatgagaggctgcagacaagggctgtcagcggcgggaagaggaggaaggaggaggaaggacggactgggcctggctgagggcgttgtcgacgaagccttcaagcagaatgtaggcgcgcgggttcagttcaggaaagcaaatggagaggttgaaaggaggacagacgggtgacgtcatcgcctccctgcccaaaggccgaccggacgacgagtgtgctgagcacgagagcgagtgagagccgcatcggatgggtgagggtgggtgagagggaggggggacgcgtcagtcagtgagggaggtttgtctccgagcagtgtcggaagcaactcgggcagcacgcgtcggtccgtcggtcaacagtctgtgctctctctctcactcactcactcaaccctcacacgcagcagcaagcaacgatggtcaagcccccgcccgacttgatcgccgtccgtcctcagccctccttctccctagcctgccacccgctgttgctgatccctcacccacggcagtgctcctcgccggcgctgctcgccgcccagctcggcgacatgcacctcctctttgcgcagccagagacggagcacaactgggaggcgttcgcacgggcacttacacggtgcgtccttctctattttttctcatcctcgtcgttcaatccgtcaagcgctcgacgatagcagctcgaccgactcagaccggacggctgaccgacgatgtggctcgctcgcgaacagactcgcagctctcacccgcggcggcgcatacaagctcgacggcttcgtcgccggcgtcggctcagcgagtggaggaggggtcggggatggcgtcgtttcttgcgtgagttcgctggtttgccggaactaggctggctggctggttagctggttgggctggcggaagggagggagaggggagacaagggcgtgggatcgcctgcctgcttgcctgcttgcctgcctgctctacctttacccttcactcaaaccgctcgatccctcactgaccctcctcgcttccgctgcagatcctctccgaacgcgccgccctctcgaaacccgcgcttgacctcctctcctccctcgccccgcgcctcggcccgtccttcaccccggccctccaacggctctacgtcccgcctttgatcgacctcataaagcggacgaacaatgtcgtccggctccgcgcagaggcgactcttgccaagctcgtcgagacggtccctcacccggcggctctcgggaagctgctcgcgccgagcgtcggcgacccgaacgtcaatgtccggcgggcggttggccgggcgtttggcgtgctcgtgggcgagtgggcgagggacgggccaagggtggacgaggtcgagggcgtcgtgaggcgcttggcgggcgataaggaccccgaggcgaggaaggtcggcaaggagctttggggggcgtactgccaggcctggccagagaaggtcgacgggtccgtcccctttcatcgtcttctcttgatcactccgctccctccccctcctttgcacgccgttggctgactttgactgccctccgcctcgatttcgacgtaggttcatgggccccctcacgcccgtcactcggaaacgcctcggcccccgcccacccccgccggccagctcgtcagccgccgaccggaccggcgcaagcagcagccatccgctctcgaaggcccacctgccggccgctggcggggagttggacggtcgggtcgtgcagcagggcacgctcggtagcggccctcccagcagtagcgacggcggccgcagcaggcgagctggccagccgccctccgttggctcgaactcagcctcgggctcgacgtcgctcgctccctcgtcctcctcgtcctcctcccaggcgtacgcctccctctactcctccttctcctgctccggtcagacggcccacaaccctccgccgcacccgcacccgctctcgctcgcttcaaccgctcctcgccggcctgtccttggcccgccgatgacgagtgcgccctcccttagctcagcaccggctgggaatgggcgctcggcgagctctcgatcgacgacggctgctgccacggggggtagcagcgccaggctacttgacgctcagacgtcgacgaccttctacccaacgccgcccgtcctctcgcgctctgcaacctcaacctcagcctcgacctcaacgatgacagcgtcaacccgcccccggcccccgatcggcacacatacacgctcgacctcctcctccgcctcgggcttcgccggctcggggctcggcctccagagcgcgatgggccctcctgcgcgtgttgcgccgagatcgatctctgcttcgattgcttccggcggcggctcctcgacggccacctctgccagcggcgctgctgcaactgcgttggcggggccgagtgggaggggactgatgtccgccccggtccggggcggtgcaggcggcggcggcggcagccatcatacgggctcgacgtcgggtggggcggggtggatgcctcggccccgaggcggagcggccgggcaggggccgactggcgctggagcgggagggaggagtggcgcgggtagtctgtcgtcgacgacgacggcgacgtcgagggtgtcaccggcaccgacgaggccggcagagacgcagaggatggtgccgacggttagctcggtcgacgacgtcttttcgccgttgctcgcctcaactaccaaataaccaacggttttggtctgggaggaccgataaagcgcccctgctccccctctttctcccttgtatgtctctaaacggtcgacaccttcttcaacacgtctcctcgccgccctctcctcttcgttccggctctcctccttttccgtttcggcgcctcgcactcccagatccaactctggccgatgtcttgcttgtcgccctctttccttcgcagcacgggcggcatcgtcctctggacgtcccgaccccttctctctctcatggctttctgtctatctggacggtcgatcggcagggtcttggccgctcttcgttgacagccacgcagtcgcagatggccgcccattccgaacctgtcggccgtgcgtgtgagggacgcactcgtcttcgacagaggatggagcgagcactcgaggggagggctgagccgtttcaactatgtttcaagaatcttgctcctggggcacttagacgactcgccccccgcgtaccgccgcctgccgcgcaacccagcaagggcgacccgacgcagctcgccctcctcgacccctccaaccgattctcctcgacctccttgacaaagatggcgccccgtatcccccgctcgttcgacaacaccttctcgctcgtcaagttcaacaaggctgtcagtctcatgcggccaatttgcttgcgtagccgcgagggaaggatcgggctcggcggctcggctcgctcgctcgctcgctcgctccttggtcggctcaactgacgcaccctcctgccttcttactgtccttccagctcaagccgacgaacgccgccctcttcgctggtacgtcctctcgcgcttgctgttggcaatcttaccagttggggtcggcttgacgctctgatcctcccactcgggtgcctgcctggggtcactctgtcttgaccgaagctgacctcgtctccctctgctgcctcccttcagtctgggtcggcacctgcttcattgcctcgaacgaggaggagcgcaagatgaacctcgtccgggccaagatggacctcgagccccggccgcggccgaagtcgtggatcacttgtgcgttcattcaccttccgctttcttcctctccttcacctcaccgcacctctcggacggtcgcccatttggtcgccttgttgctcggcgcgtccgaccacgatatcttgtgcttctgtcggagccgttgtccggcacggctggagagactgggctcggttgccgggcgggtcggcgtcatcgtggagagccagtcgcacttgacctctgtcgggcctccttgggtggattgttggttggatgggtgctcaaccgcgctatttgacatctcgcgcgtcgtgtgccgcgccagttgagtcgcaatggccgcttggatccctcgagcgaccgccgactgtcgacgcctaaccttcagatgcgctcttactgaccctccctcccaccctcgtgcctttgccctacgcagtcgcccggtggaaccccgactccaagtaatctctcccagctacgcactgccggacatgaagcttggagtggcggagggacgcaagggagcacggatgggcggctcgtttgcaggagagaagcgggccgagtgggtggcgcaggagggcgagcggaggaggaaccgacggcggatgccgatgtgcatgcgacagtctcaactaaatgaaggagggatgtgcgtaacgcggcaggtctgggcgggtcggttgacgaaggacgcggatggcgggggtcgagttgaaacgacgagagccatgtctcgacgggctcgacctcgtctgacggctccaatggatgcaaagttgacaggcggggcattggatgagagcagaagaaggaaacgcggaatagaggtggagggtgtggttgtacaaatcgccagcgaggcccgtccctcagcgcacgcatgctcgtctggcccgacagcggcgaagagaagagagaggacggctgacctccaaggctctcgcctgaggccaaaagctcgctccgaagcgcaagttagccggagcgttcgtggagggtgtgaagcgagaggatcgtgattccagacgaaggcgacaaggcaatctactcctccatcgcgccgctgtccgcctttgggacgtctttcgactcgcgaatgtagaggacgttgttgcacctgtagataggcgcaccggcagacgacggaggagtatcaaggacgaagcaggaggaagctcgatcatcagcaaggtgccgggtagtcggctcaggtcgaagccagagcgggaggagggcgcaccggatgaagacctcgccgagggcgccgttcgacttgccgtcctcaatctcctccgtgttggcgagctgacggtgagggaaggcggacgagcaccaattccatcagcgggaggaagcaggggaaagcaggcaaacgatcgcaacggagtcggtcgaggtcgagagctgctcccagtcgcaagcccctgctcggccgtgcgtcacgcgagcgatcaggagtggaccgacctggatgttcatgtagccgtcagtgctgacgaggaagcccttgtactcgaggccccacttgagcttgacgtagacgaccttgccggtcagctcctggaggaacggcttggggttgacgggggcctggcgggccgtcggggcgagtaaagcgacgagcatcagttcccgaggcggagagggcacgatgcagtcctacgcacgatcgacatgtctaagaagatcaggcgaagtgggcaagctgggttggagaaggtcgatgtcgttggaccagacacgacaggctcccggggctgaaaagtgcctgcgggccgcgcgcgcgcgacgagcaggacgagcagcagcagcggcgacacgagcttcacgacgacccgacaacgacggcacgacccgtcttgcctgcctgcccctcggcaccaacctccacgacatcgctcctgtcggtcgtcgctctctgctagcagatccgatccgactctcgccggctgcgccacctttccgagctctcactcccacggctgaaggcatccggcgcctttggccacgcccctcctcaatgtcggacaatgaccaccgtggcggaggcggagccggcgacgatgacctgacgctgcccaaggcgaccgtccagaagctgatcgccggtgcgtcggtcgtggccgtgtggagaggaagtcggtgcggcgcgtccgagctgactggccgtcgtctaccttcgacgtgactcgccgcccttcgtcacggcagacctcctgccaaaggacatgatgtgctcgaaggacacccgggacgtcatcacgtcgtgttgcgttggtgcgtccctccgagccgtcgaccaggagcttaactctcgctcagcacgctgatggacccgcccgccccccccccccccggtcgagaaagggggaaagagggggtcgcgcagcaaaggggtcgcctcctgtcgacgcccttgacttggctttcggcccttgtctcccagtcggcgaccgctttctgtgtgttcgccagcccgtccttccctaaaaagtgagcagggctggagttgaagaaaatgagaagaagggcaggtcatgagttgtcaaaggccccctcgcgcttctcgtcgttacaatcggccactgctttgtctgcacgacaggcctccgccccttacgcaacgcccgcggccttcatccgctcgaccatctccccgaccgacccaaccttccccccaccgacgcgcttcgccggctcgcggagctcgagcgtctcgagccggtgtccgacgtcgacgcccaagtcggccggcgtcagcgtcttgagcgccttcttctttgccttcatgatgtttggcaacgtcgcatagcgcggctcgttgagcctcaggtcggtcgtgacgaccatcgggaggacgccgtcgaccgtctcgagcccgccgtcaatctcgcgcgtgacgcggacggtgccgccctcacggagctcgaccttcgacgcaaacgtgccttgcgaccagccctggaggccagcgaggatctggcccgtctgcgaggcgtccgagtcgatcgcttgcttgccgagcaggacgagcgtgtagcctgtgccggtcggctgcgagctaaggaccgcagagagaaccttggcgatcgcgagtggctcgggagagggcgcgccttcgggaagcgagacgtggatcgcatcgtcctgaggcggtgcgggacgggacgggcgcgcaagagcgagggcggagtcgtggcgaaggtgagaatgtcgcgggcggggtcgcgagcgacaagggggaggtgaggagcgggtgaagcgtcagctcccattaaactcgcaatatcatgccgagcgggtccacagctcgcacaaccgcccttcgagcgagggcaagaggacgcgaggaagatgaggtgtcgcgagaggcccggctacttcggccggtcgggctgggccggtcgggctgggccgaagcgaagcgcgctgccccggcttgctcactgccgcccgccccgccgctgccgctcgactcacgctcgagccagcctgagccagcctggcgaccgatggacccccggaattgcgcccgtcagagagcgagtgcccaacctcctgcccttcccgcccgccagagaaagatagagagagagagggacgcaccgcgcccatcgcgagcgccgtccgaagcgtctcgatcgtctttggcccgccgaccgagacggccgtgatcttgtccaccttctcgccgccagccttgagggcggccgcccgaatccggagggcctcttcaacggcgatttcgtcgaacgggttcagactgtgcgcgtacagggtggtcagcgttcggcgaggcgagagggagcggcgagagggtcggaggagggagccgacctgtgcttgacggcatggtcaacggcgccgttgacgagccgtggcttgaccgtgtagtcgatcgtccgcttgatcggaacgaggatgttgagctggcgggcgagcgagggtcgcatggcgggcgggtgttgaccggggaatggcggtcgatgaggtcaggtcggagaggaggaggaggagcacgggctggagggcggccgacgggttcccacgctctgaccgcccgcgcgggtccgagactgcttgcgcgccaccctcggctcgaagccatcaacgacgacctcaagcaggccgacactcgactcttcgatggcacgtcaacaccagacggcagccgacacggacctcgcagacgtcgtgcccgtccttcgaacccgtcagtcccttgtctgtcccttgatactgccgtctctcggcgtcctccatctccctcctgtctcgcaccctcgcgcctcctgcctcggcctctctctttcttgagcgttcgtcgaccaggcggcagagcgcaggcctcggatggctcttcgcatctcatccagcctgtcctcatcgtccgggccttaaagaggcaggggcaagcgacgagcgcatgggtaccccgaggcgtgagatgggcctcctgaggtgccagacactcaaccagaggccacacgagcccgagggcccttcaggagcgcccgccatcggacacaggagagcatgactgcctcaccgtctagtgctcgaggttcatgtctctttgtcccgctcgtactgtgaggcttgccatgcacgccttggccggccgcttcgcctcccccctgccccagctcgacctctttcccaggctgatcccactaactctccccgcatttccatcctcatcgcatctcgtctcctctcccacgggctccgatctatacctcgctccactgaacaccaggcctcgaagccgaatcggcttacctctcgcaccgactctcgtcgcaccacccgcagcagcagcacgccgccctcccttcctcatcctcttcaaacgctagcagcaccggcgggatgcttgccttccccttgacaagctcgcctcagccggctgggaagagcaacagcagcagcagcatcagcggtgctgggcagggtccggtccgctcgccgtcaaagatccctgtgtcgccgatggcgagggcgcggtcggcaaagtcgtcgcctgcgggccgggccagctcgccctcgacgacgacgatggcgggcataacgggccgctcggctgccggctcgctgcaggcagcggtaggggacgagtcgcgctcatcagcaggcgacgcgatgagcgacgaccgctttccgccgggagggagcgccccgccccctgtcgtccaaaacgggccgacgagttcgggctcgtcttcggccggccgcatgcgaacaaaatcgacgccgttcgcctatgccagctcgactggctccggcgcaagctcggccgtctcgctaccatcagcgccggcgagggcactgtcgccgcttgctctctctaccggcagcatatctccgtcggtggccggcaagatcagccgcaagccgctttctctcgcgcaaggcgaggagctcgacggcggcgtgcagcctccatcaacagattacgagtacgcatttgtcaacggtcggggctcgtcgggtgctggctttcgagctcagcagcagcagcaacagcaacggcagcagcagcagcagcagccactcgcaccgccgcttcagcctacctggtcgggtgcatcgcaattatcgaccgacgacgtcttcctgccctcgttgtcgtcggtcgataattgcgatgcacccgaccaggtaggctgaagcggcggtgcgagtggctgctgctgctgctgctgccgttgctgttgctgctgctgctgggggggatgggcacggaaggaggggaggaggcgtcagccgtcgagcgcggagtgggcagggagaggaagacgaccagagcgctcgctcgcttgacccgctcgcccgcccgccgagcagcagcagcagcaagcccagacgggcgcagagcgagagagcagacggagacgaaggagagagaaaggacggacccgcggagcacgtccggctcgccctttgcctcgccgtcgacaacgtcaaagacgcggaccgtcttgtcagacgagcacgtcgcgaggcgcttgccgtagtagtccatctgggcgtcgtgctgccaggttgagggtgacgtcagcctggagcaggcagggagggaaggagggtgaggaagggaccgacaatcatctcgtcgtgctgggtctcgaccgtgtgcgactttgagacggccttggaggacggagcggactgcggcgggcgcggaatgacgtcagctgctgatgagtcttacacctcccaggctgcactaaccatgctgggcagaaagacgatagaggtagagagggagggagggatggaggagggtcgatgcggccgtcggtctcgcctcgtctcggccgtgcgatggcaacgcggccgggcgcgctgcgctcatcccgtctaagtccccccttgcgcgcgcgcgcggatagatgaaatcctcgtcgtcgacggaggaacgcgccgccggccatccatcgcaacctcctcgacctgcttcgaccgaccgactgcatacaccccctaccctctccccgctcccgagcaggaaaacaaactacaaccacagcccgaacacccgagagacagtcaacgatgggagacacaggagacgtccgtcccctgcttcgcgcgcggcgttgctggctgcaagcctaggttgctcgagagctcggtcgctgatctgctccttctgctccctccctccgccgctattgctcctgccgctcgtccctgcctcccatcgtcgtcctaccttcctcgccgtcctcattccgtcgcccggttcgcctactctcacccgcacgcaggtcgacgcctggatcgcccagcttcagcagtgcaagacgctgagcgaggccgacatcaagcggctgtgcgagaaggtgcggtctctcgcggggtcgctcttcttcgacccctcctctgggctccatctgcggttcttcgcgctcgcgctcggatgacgagtagggtcggtcgggggcgggttgggctgccgggtctcgtgggtgcgcagggagacgtcggacgcgtgctgaagagcaggcaggggctcagggtccgagaagggcgagagatggagtcgccagccggccgtgcgagcgggacgcaaggcggccagcctggcggtctcctcctcgagagtgaagagccgggctgagcgctctcctttccggtccttggcctcatcgcgctcggtcgcacgaacgagcccatcatctaccccgccctcctccgcgatccgcgaaacacgccctcgacgacgagccggacgactgactgaagcgctctctctctcttcctgccttccttccctccgcctgccgcctcttctcttgccggctgctccttccctttcggaacatcttcgcctcgccgcacgttcgcccgcgctaccctcgtcctccttgacccaacctcgctcgacttggaccctcctcgtcccgcgctctctcctttgccctccaccccttcccccgcgaccgaccgacccgccctcccacctaccaccaacaccaccgctcgctcgcacgctcgctcgcacgcccgcacctaaaaccagacgcgcgaggtcctgatggaggagtccaacgtccagccggtccggtgccctgtcaccgtctgcggcgacatccacggccagtttgtgcgtcgctcgctcctccttctgcccctctgttgtttgctcaagcctggtggtgggcgtcggggtctgctgatagttcgagctggagagaagggggaccgcggcggcttggggttttgagcggggtgcagcggagctcagcagagaggccgccttggaggagcaggatggctttgctcttggaggggctgcttaggaggccggacgagcagacccagcaagcagctcgcgacaagccccgagcaggcatcgaaccacgccagggtcacgccagagagcgcccctttcggttggctgacgcctgacgcgcacattcgttccctcccgccagcacgacctgtctgagctgttccgcatcggcggcaactcgccagacaccaactacctcttcatgggcgactatgtcgaccggggctaccagtgcgtccgccttcttctctccgacccagcccgaaactcccggcctgacctttgctttcgcgcccggacggcagctcggtcgagacggtcacgctcctcgtcgccatgaagctccgctaccgcgatcgggtgacgatcctgcgcggcaaccacgagagccggcagatcacccaggtctatggattctacgacgagtgcctgcgcaagtatggaaacgccaacgtctggaaggcgtttaccgacctgtttgactatctgccgttgacggcgctgattgagaatcaggtgcgtcgggcggaaggcctttgaccgccgttggctggctgctgacggtttcctttccctgcagatcttctgcctccacggcggcctctcgccctcgatcgacacgctcgaccacatccgctcgattgaccggatccaggaggtcccgcacgaagggccgatgtgcgacctcctctggtcggacccagacgaccgctgcggctggggcatctcgccccgcggcgccggctacacgttcggccaggacatcagcgaggccttcaaccactcgaacgggctgacgctcgtcgcgcgcgcgcaccagctcgtcatggagggctactcgtgggcccaggacaagaatgtcgtcaccatcttttcggcgccaaactattgctaccgctgcgggaaccaggcggcgatcctcgaggtcgacgacgcactcaagtatacgttcctccagtttgacccggcgccgcgcgcgggcgagccgctcgtctcgcgccggccgcccgactactgtcggttcccttttttcgttgcctcgcgctcgccttgtccatctcactgaccgccgtcctccctccgccagtcctctaagcgtcgtccgtcgtccgtctcgcgagtctcggccctctctgtctctctccctctcgtcttccatagcaactgcactcccccctccccaaccctcaacccaagcacgtcctcgcttcgcttagaagatttcgcgccccgaaccggataaaggggagcgaaccgagctcgagacggcgcgtccaagcgagacgactggcccgtccgacagcagtccggaccgaatcaggcagggggacactcttcactccaatgttccgcgctcaagacaaggtcattgagaatcatcatgaagcagcgctgtcgtctgctgctgccggctgtactggcgctggcgctgctgctacaggctccgcacctgccacgagcccgccgtccgccgcttcggcccctccgccctttcctaacgtcgcacccccaacctgtcctccctccgccgccgccgtcgccgccggcacaaaaggcgcaaagcgcgacttgaaaggcagcgctggcggctcgaatcctgccgggaacgggttgatccggttcgggatctggagcatcgcgcagaaagcgatcgtttggggattcgtgtaccagttggctgggggcgggcggacggggctggtcagctcacgggtctggagagagatagagggaggaaaggatgggaaagaaggggcgcaccaggtcctccgccaggctcgcccggccccggcgccgtcttccaaaacgtctgcacctcatcgaccttgaccctcccttcgccccgctcatccagccccatcccctctttctcgacccacgccatctcctgcgcgacgcgcgccttcaactcgggcatcgagggcaggcggaggggttgaggtgtgagtgagaggaaagggtggagggcgcgcgtgatggcgagccagtgggggtcgtacgtcagcgacgggcgggtgccggcgccgccgtcggaggaggaggagggcgaggcgagcgggaaggggatgtcgagaatctgatgtgcggcgagggggcggaagtacatcagaaacgaagcagtcagctacgagtggccgggcgagagggaggtaagagcgggaaggaagaggggggacggacctgcaggaagtccttggtcggcatgcacttgtcaagcgccagaaagcgcgtcacgcccccgtcgtccgcctcccccggtcgacctcctcccgggcccgacggcgttggccggtcgtcgacggcggccgctgccgtcgacgaaggcttggccggcaggcccgccgacaggccagcgccgagcgggagcccaggcacatgtcggtggccctttggctcctcgtcaagctcgtcgtcctcctcctccgcctcctcggcgtcggcgtcgagcataatctcgtctgggttcccacctccgaccacagacgccggcgacgcggccggctgctgggccagatcgcgcgtctcggccgcttcgaccttgtcggccgtctggtcgaccgcctcctctgcagcagcagcagcagcgggcggggcttcgtcgtcgtccgataggctaatctcgtccgggttggccgccgtcgctgctggtggtgcggacgccgagagcccgtcgtcgtcatcgtcgtcgtcgaggtcaatctcgtccgggttcttgacggccggcgcgccgaaaggcttcggtggcaggccgctcgcgccgacttgctccagctgctgccgtcctcgaccggcctgctgctgctgctgctgctgttggcctctcccctgaccgccgcccggctcgccatgcttccagacagccgcaaacttgacgtgcagatgggcggcaaaccaccaggctggcctcagcacctgcagcaggtcgcgcagcggcggcgagccaagcgtgtcagattcaatctcggacgcgaagaagggcttgcggcggagaagctgggggaggtcgcctttgggggcgatagagaggggccagtcgtgtgagaggaagatagaggggtgtggcgagggagggaggagcatgagcttggtgacggtgtgatgccggatgtggtagcatgaccggagggtcgaccggtcataagggagcgtctcgaagaagcctgcccgcccgagtgcgacggcgagagctagggttcagcagagctaggagccaaagggtccgcctgtgcgagcgagcatgcgcccgcccgctcgcctgggaggactgacccttgtggtaatcgtggggcttgtagatgcccgaggcgccggtgatgcgcaggccgttgacgaggaccgagccggccgtgccgagatagtagatgttgggcgcgagccagccgccgtggtacctgcaacgctcctaccagtcagcccaaacgcgcgtctgtctgtctaggtcgctgcgtttgtgcgacgacgaaagacgcacagttcccacatgtagtttgaggcctcgtggttgccgccgatgacgatcgtcaggacgggcgcgaccttctcgcccgtatagtagcggtggaaggagccgagctggcgaaacttggccggaacggcgagcgactcgtagtcgtgctcgtttcggagggccttcgtcgggcgaggattgagggagggtcagcatggggtcgccccgtctcgtctcgctacgtgttgccctaacgcacctggaagtcgccgcagacgagcaggagctcgacctttgtcccccgctcgtgctcggcccttgcaagcgagccatagatggcgtcgagctcgccgtggcagcagccctcgatggcgatctaggcacagtaggtcaggtcaacatgggtcatctagccggtcgacgggtcgggacgtacatgcatggtcgtcgtcccgggcgaacctgctcgaagccgctcctccccgacttttggaagcgacgccatctcctcctttgacgaccaccaccgaccccgcatacacccaactcaatcctacagaccatgtcgaccgtacgtgtgccatcgagacgtgacagacgaggtcccgcccgagctgaccgtctttcgggtcgtagcaggccgacgacttcaaggcgctgggcaaccaggcgtttgccgcaaaggactacgacgaggtccgcttcccttgctcgccctactgctggccattgacctcgttcgctgactgctggccatctgccgttttctacccaggccatcgcccaattcacaaaggtgcgtggcaaggacgagcggggctctcgacaagtcctcgccgacctgctgctgacacgctcgcgctgctgctgccgcccgcccgctcgcctgcctgcaggccatcgagctcgacccaaagaatcacgtcctcttctcgaaccgctcggccgcgtacggtggcaagcgcgagtaccgccaggccctcgaggacgctgacgaggtgcgtccggctacagcatcgtcgtgtcggttatcggtcggcgtggcaagctgaccctcctcctgctcgcccacccaacgaacggccatctcgactgatcgagctggacctggaggtcagcctccgatagcagggcttgcttctggctgtgctttcgacaggaggagagcggatagagggtgtagggcggtcggggaagacgaagggcgggcggccgtgcgagagcggcagacgacggcaggggaggcgcgggcgagggaccaagagtcagcaatggagagcggacagtgtgcgaggctgtcactaggcccgtcctagacgacctagcaaccgtcgaggaggacgaggcgagggatgacagggaaagctgcgaggtggatggaggggagcgactggcaaggtcgagcggcctcgtgcagggggggtcggcttcctagactcgccctctcgacagccggcgccggcacgacctgggatgagaccagcagggacgtccctgtcgcagggagcgagccaggatcaggtcgatggcgatgctgctgacaggaggcctgtgtgaggaggagaaggaggaggagcgaggcgacaggcggaacaggtcagcgccggcggtcctgtttccctgcccacctcgacgacgactcacgacagcacggttaggactgaccctcttaacatacttggctgctttcagtatcaatggtggtcgtcgacaggacaggaggaggcgagcgacagggcgaagcaggcgagcgcagcagcccagcaacctgcgcctcgggacccgcgcgcgcgctcacccgcccccctccccttagctagccggccaccatctgactggatcgcctccagaatagtttttgcaacctctcccgagttgtaggaacccggcggtaccggcctcgtagcgatctcataagatctcgaccaaaagggttttcagcccgcgcaggggcgagatgcctggacccccctcccatccttttccggccgtccctgtgaccgtatcccggacagactaatttcctgcatctctactggtcctgaccgaccagtcaggcaaagtctcgtgttgatccgataagattcgccaaatcgcatgaaccccttgcctaggaacgtctcttctctccctccatccgtcaccccgtctctctcggccatgcccaaagccccctcgtccaccgccgctacaaaggccctcaagtccaagcccgtgccaacgccccccgccagcaagccaagcaagaagaagagcaagcctgccgccggcgcgcctgctgctgctgacgcgggctcgagcacggccgctggcgccgttgctggccggaagggcgcgtttgacattgactcaatctttgcgacggcgggcgcgtcgacgtcttcggtggctgctgtcgggcagaggaacgcagcggccgctccgtcgtcgtcgactggcggcaaggcgaagaagaagaagaaggccgaggcggcaacggctcgagcagaggtggacgacgagcagcgtccgacctcgtcaacgacggcacttccctccccgaccaacccgaccggcagcagcagcagcaacagcggcagcagcaagccgaagaagtcgtcgggccagaagaagccggccgtctcggtcgcgcgcgacgaaatcgtcgacccgagcctgggcgtcgggcgcaagccgcctgctgcgagctcggcgggggttgcgccggcgttggtgccggaggacgtcgcggcatttatggactcgaggggcgaggccggtcagtctcttgccgtccctttcgcattctcacgtggctggctggctgaacttctttgtgcgcatagcctcgaccggccggacgacggccgagggcttccggatcttcaaggaggctgcgctcgaaatcgacccagaggcgggcggtccgtctcctctccctgtcatgccacttcgaccgagctcgaccttttgcccggcggcagcgcttggaggcgctggtgactgacagcgctgctcctctccccccttccatcgcctgactccttctgcgcagacaccccgctgtgcccgttcgactgcgactgctgttcgtccccctgcttctgcactcgacacgttgaagcctcggccggctgagtctgatatcttcgaacgccccgctcgcaggctattgaacgaaagcggcctgtgtcgattgtttgaggcgctcgggtgggcgcagagtccgcggaaggtgggcaggagaagagagagaggagaggcgagggagaagggggctacatgggcggaggtggagtctacgacggctgacaaggataaaagttgaagggaagggggaccgtcgccgtgcgcgacgagtatgacttgacgtctccaatcccgccgggaggctggcgaccttcggcagggtttacgagccggtccggttggccggcccgctccctgcgtagcccgagtcttcgcggttgaaggcattctcgccgccgccggcgctgaaggaagggaaaaaggtcggccagccgctgtcgtcgtcgtcgtcgccggactcatcgagaggagcgctgtgaatcagctcctcgccgctcctgctgaccgctcgctcaaagtcgaagtcgaactgcagcccaaagtcgaggccgccgccggtggcgctggcgtgcggccgcatgaaacggtcgggagtgctgaaccctgctggcgagagcggacgcaggttgacccctccttctcctccgccgccgccggcgccggccgggctgctgccatcgttgtcgccgccatcctcgttgtcatcgtcgtcgtcgtcgtcgtcgtcgtcggacgccgccgccgccaaccccgaccctgccctctccgaccgccgccgagcgtccggcgaagcagaaaggatggccggcgtcgtcagttccgcgatcagggtcgagttgctgctgctgccagcggatgttgaggatgaggtgcggaagccaaggatgacactgaccgaacacgtaatgagatggggcgggtgtgtgtgtgtgtgtcagcaggtgggtttgtcaaagggagagaggaaggaggacgggtgtgagaaagtgatcagccgaccgcccagcctgcttgcgtgacagacggaaaggacgggaaggtacgggagtgagacgggaggagacaaaagggggacggacgtgtactcgccgagccacgcccaccggccgtactcgcgccggatctggccgagccctgtcggcggcggcggcaggcggaaggggcatcgtgtcagtctcccagcgggcgaaagcaggcgcccgagtgcctcgcccccgagcgttgcaatgcaacgggacaaagggggggggggggttggatgtagggtcccttccctcctcccgctctatcaacttactgacatgctttggctcgctggacggacgacgtaacaggacacatcggccctgcgcgacgtcgacgaacggctgtttgaacagctcgacgggccggcgaacgggggtgcgaatggaggcgagagcgagtcgggcagcttgctcaggcagtcacttcttgcgggcgtgtcggggacgacaaacttgcaatgtcagtctcttccccatcccccgttccctctttttcttcgcgccggacactctcgctgaccgtccaatgctctctctccttttgctttccctgagcagacggcgcgacttcgctctcgtcctcgcccgtcggtaacgcagacatcgtcgagcgcgccgagcaggtccggcgatgagtgtccctccgaccaatgggcaacacacccggaggaaggaccgaagaggagctcgtttgcttgacgacgatgccgggcggggggtagggggagcaggagcggcgcgtcgtgcgggcgtcggggacggaaaggggggacgacagtcggtcgacccccggtggcggctcccaggagcgccaaaggctgccgtcgatgaagagaaggcgcacgcttgtactggtcccccctgcatccatccatctgttgtaggccgatcaaccgatggctttttcacgaaagcccttgttcgtcttgcgtcgttgtcgctaggtcaagcccggcccgctgcgcctcctgcttcgctcgcccctcggacagtcacccccttcggatgctcagccgcaccaccccctcgccgaccttcttcacacgtactttcgcaagcatgactactaccagtctgactcaccgctcgtccgtctcgccgccgccggctgcgaagcgccagaggacagccctaggcgagcagccagcagcggccgagctcaaacccgccgctcctgctgctgctgctgctgctggacctactgcggtcgctggcccgagctcgcacgtcaactaccggaacaaggcgttcctcgcgccgatggtccggagcgggacgtgtacgtctcgtcgccgacccggccgcctcgctgtcatgaagctgactgagacttacccctccctgacagtgcctgccgtgcgcctcccgccgactcctcgtccaattcctgggccagcgagcgctgactcgccctcacctcgctttctcttgcgctgcagaggctcctctctctccagtacggtgccgacctcgtctgggggcccgaaattgttgaccgggctatcatcggctgcgaccggaccgtcgacggtgagccctctcgcacctccactcccctggcgcctcgcctgcacccgcgagctgacgttcgagcttgtcgaatagaacggactgggctcgtgacgtatagcaagaagggcaagccgcagtggtggacgcacccgatcgaaaaggatcagctgatctttgtgcgtgcccctctcttcctctttctgcgcctcctcacttgaacgctgcgccgagctccccctctcccctccctggctcggccgctgcgcccccttgactgaccgacgacgacgacgacgcctctccgacccgccgccccgcagcaaatcggcacggccgacccaacgctcgccgtccaagcggccttaacagtcgagcgcgacgtcgccggcgtcgacctcaactgcggctgtcccaagcccttctcgacgcacaacggcgccggcgccggactcctctctacgcccgacgtcctctgctcgatcctcacctccctcgtctctgcgctctccgtccccgtctcatgcaagatccggctgctcccggatcaggccgaaacgctcgagctcgtcgagcgtatctgtcagacggggatccgcaacttgacggtccatgcgaggacaaagacgatgcggagcaccgagcgtgcgctgatggagcgcttgagcgacattgtcgacgtcgcgagccgttacggaatccccgtcgcggcaaacggcgacgtcgggggcatgtgggactttgcgaagatcaaggctttgaccggtgcgtccccgaagcttcttcgcttcactctgcagtgttggagggagggctgacctgtgctctttaggcgtctcgtctgtcatgattgcccgagcggccgaggccaacgcgtcgtgcttcctgcctgacaccccgctcgacacgacgacggccgtcatcccccagctgatccgctacgtgcgtctctcctccttctccaccacctcccccttccctctctcgagctccaggctgacgtattctccttgtcgtcttgatccaggccgcccacttcaacaaccccttcggcaatacgaaatttctcatcaacaactacgtcgcctcacctttcccgctcgcggtgctcgacaagcagacgacgaaggccgtccggtcggccgcggccgggtgtaaagactatggggcgctcgggagggcgtatgcgtttgtgcagtcggcggagggcgggctggtcccggcggcggcgacggcgagcggcagcaccaccaccggcgtcgtcgtcgtcgagagctctgaagaagagcaggcgatgaacggcgccctccccgccgcggcaggcgacgagccccacccagcaacgctcctctcgacgaccgaggtgctcgcgcctgtccgcgagggaattgcacggcgcaaggcggagcgggcagagggcgtatgggcttgtgggggtgagggagagcggagggctcatgagggcgaggaggagccggcaaaggcggcggcagagaaggagaaggaggcggtcgttgatcagccatgaggttgcctgggccttgctcgagagccgcttcacctgaggtgctcttgcgaggaaaagaagaaagggggcatgggatgactggcagcaagacggacgacagcgctcccacttcgtctcgctcctcactcctcgcccccgtccttccctccctcgtacgcgcaagacgctcagtcaaagccgaagccttcgtcctctccaacgataaacggctcatcggcgtgccctcctccggcgccggccgctttggacttgcgcaaagggtcggtgatgatcaggccttcttcgacgctgtcgcacgaagggggaggagagggagagggatgagtgtcgggcagagagagagatgaggagagggaaaggcgcgcgaaacgtacagcctcatcctgacgatcgctctgaccgtctccgcctcggccctctcaccctccacaagcgccttcctaaacaccccctccctctccctccctccctccctcaccgccgccccaagcccaatcacacatccagcggacgagagagcaggacacaccgtcaaaaagaagagcgagacgagcgaaaagacgtcagagagcgtctggtcgaccctgtttggcgagttggccgagcccgacgagccgtcatcatcggcggcgccgcctcggccgccaacaacagcgccggcgccgccactggccgagctcgaaccgccgacgccgccggcagagtttccgtggccgtggtcagaggcgccgccgccgccgccgtttgcagacaaggctgacgaggacggaggagggtgcggggctgagacggacaggtcgcccgcggacgcttcgtcccggaccgtgttaagcttcgtcactggctcgcggcaagggaggcgggtgagaggagggagagggggggatgagtcaggtcggttgcgggcaggagatttgacgggcaggtttcttgagagagaaagggggacgcaccctgcttcaggacggcatggtagattgagtcgacatctggcgcaagagaaaagggacggtcggttcagttagcccttgaccgtcagcccagcaaagcccgctcgagccgagcttcagtgccccacaatgctcagcggccaacctctcacggcccaccggccccggtgaggcaaaggagggaggcgacaaaccctgcggccggatgtagtcatttgccgagcgcttcttgagcgcttggaggcgggtgcggatgctgaagcggacgaaggcgggcgggcgggcgagcggcagggtgtctgggtcagccttggagtctctctggaggcatgcgatccacgcacttgatgagcgactcgaggatttgttgctcttcctgcgggaccatgcttgctaatcagagaggggatggatggtgggtgagagggcacaaggcagcgaaaggccaatcgggcccatcgccctgctgccgagccgcgcgtcggacgccagcctcgggattgggtgtcaggcttgaaccccggcgttggccgcagcacccagctgccacccaaccacgcggtcgtgcgagagaaggtcgatccctccaaccacccaccctcctgcacaagatgcgccgcctcttcctcctcgctcttgccgccaccgccctcaccatttcgccggcggcgtcggcctttgagctcaagactgacgcccaccgcctgacgcccctcgacctcgtcaccctcccgcgcgtctcgcccctcggcccgggcggcatctctccctcgggcgcccacgccatccacgccatctcggtccagggcaatacgacgctctacctttcgtccgtcacctccccgctcggccaagcgccccttcccgtccgcacgggcccttcaggtggccacttctggctctcagagaccgagctcgccgtgctcgacccggaattgaacgcgctcgagctcctcaggctcgacttgaccctcctgccagccgcgcttgccgtctcgccgccccggacgcttgtgaggttcccgacggccgttagcgacctgacgtacgacgccctctcgtcgacgcttgccttcactgcctgggtctggcccgatggcgacctcgcgtccgtctctcggcaggacgagcagtacgcggcgaggggcgacgatgcgctcgtctatgacgcgctgtttgtccggcactgggacacctggcgtggaccgaagcactcgcagatctttacggtcgacctcggccggcagcaatccaaggcgggggccggcggctggcggtcgtccggccgcttccaggcgcccatcaacggcacagacctcgcctcgccgtcgcccgacacgctctcgtccttcgcgctctctccaacccacctcctcctctcggccaaagaccccaagctctcacctgcgacgcacacccgccggcccgtctacctcatcccgctgcacgcgcgcgcggcggcgggcgagcgcgtccgagaactcacggccggagggaagggcgcgacggccaacgtccggttctcgccggacgggacgcgcgcggcttggcttgagatggcgatcgacgggtacgaggcggaccggaaccggctgatcgtctacgagctgtcgtcgtcgtcgtcgtcgggcgccggcgaccggcgcgagtttgcagaaggctgggacacggcccggtctgcgttcgagtggctcgacaatgagtcggtcgtcctcgtcgcttcggagaatgcaacctctaggctctacacgcttgacgtcccgaggcgtccgacggcggctgagcggtcacgccagccgacgaccgtctatgcgacgcactcggcttcggaccccgtcgtcgtccgtccgcctgcggcagaggcgggcgggccgacaaaggtcgtcttcagcaggtcgagcctgtctgccccgccagagtcgttcgtcctctccctccctcctcgctctcactcctcgaccaccaccgccgccggcgctggcgcctccgcgctcctcgccgctcatcctgtcaccaacttcaccgcctcgcaaatggcgtccaagcggctctcttcgcccgagaccttcacctttcccggcgccctcggacacccgatccaaggctgggcgctccgcccgccctcgtccgacctctcccggggaaagacatacccgctcgccttcctgatccatggcggcccacaaggcgcatgggaagacagttggtcgacccgctggaacgcccaagtgtttgcctcgcaaggcttctttgtcgtcgcgctcaacccaacgggctcgacctcgttcggccaggctctgaccgatgcgatccaaggagagtggggcgggaggccgtatagggatctcgtcgctggctttggctacgcgctcgaacgctggccggagattgatcgggagcggacggtcgggttgggagcgtcgtatggcgggtacatggtcaactggatccgtgcgttcctcctcctcctctcttgcgccagacgagacgacgactaaccgacacgcgctccatcgcgtttcctgcgtgcgtgaccagagggccacccggatccgttcaacttcaccgccctcgtctgccacgacggcctcttttcgacgcccgacggcttctacacgaccgacgagctctattttaaccagcgcgagtttggcggtgggacgccttggaccgacagggcggcatacgagaagtccgttcttctctccggcccttccctcctttcgcccctcctcttccttctccgctcgcgctgcccccgccccctccactaaaccctcctgggctcgcagcggctctccgaatccccgaccgttcgcaagcaggacctcctcagcttcctcgtctcgcccctttcgcgcctctcaaagctcgagctcgcgctcgaccgactccgcaagatcaccccggccgacgagagcgcaggcgacgacggaggaggaggcgacgccggagggctcgccgtcgtcctcgaccagatccgcgggatgctccgtgccgtccagcccggcgtctcggccgcgtcgtccaaagtagctgcgtggcagatcggccgggcgctccgtttccggcgtggcgagcggagtgacctcggtctagctttggagagcgacgagcgagcgctcgtccggatcggccgggtctggcggaggcagaggaccgagcgggattggcatgggtggaccgacgtctgcttggtgctgtttgacaattaccttctgctgacgagggaggaggccggcgggccggtgagcgaagacgacaaggtctatgcggtcgtctcgcgcgtgcgttttcacctcgttccttcgtccacagccccctgctctcccccttccttctgcgtgattgctgaccccgctggccttctcgcccgcccattccgcagcccattccgcttgaattcctcgccgtcgtcggctccgaacatgacccttccgaacaccggcgcgacatgattgtcgactatgcccggcgcagcaagcccttccgcaccggcaacggcagcctgctcgacccgctcctccagcccgagcgcgagatcttcccgttccacatcgagcatgtcgggctcaagaagggatattcgctgtacgtcgagagcgaggaggggcggcgggcgtggcttggggcgatcaaagagcagacgactgttcggaaggtcgttctcgagaacaatgcggtgcgtccccccctttccctcgactgacggtctgtaccctcgctttcgctcattgacacgctccccttcatcggacgacggcagctcttctccatcagcccattgacttacagcccgcccgcgcgcgttcggcctgcctccttctgccgcccgcccactatctcacgctcgaccgacaccggccccagccccggctcgccctcgacctcgctcacgcccggaggcgacggctcgtcaacgccgccgccgctcagacagcacgcgacgtcaggctcgatcagctcggtccggtcgatccagagcttggcgccgccgacggagccggccgggagtgcgggcgcggcgcagagctcggtgatcattgctgcggcggcgtcgtttggtgcgtcctcccgctgctgggctgagcatccgacattgcccacgactgacgagcgtgatccgcatctggaccgagcagagcgctacgacaaggaaatgtttatggtcgccgacagcgatggcctcagcgtcggctaccgcgatgactcgcgctgtgcgtttctcctcggtcgcccgagtccccgttctggtcgcttttctgacgagctttcctgcccccccctctttcttgccagcccaccgccggctcatcgagtcctcgtccatcaccgatctccagctgctgcccgacgcagacgccgtcctgatcctcgcgacctcaacactctatgcgctcgacctccgaacgctcctcccgactgcggacccggacggctggccgcggatcaggaaggacagtgggctgacggtcagcgcgtggggcgagtcggtctcgggcttccggctcggccgacgcgaagcgaggccacttgtcgtctactggtgtcacaaccggctgagcggtcagagcgccatcgaggtctacgagcccctcctcccggcccccgacccggctgaccgctcgccctcgatccgctccgtctcgagcttctcacacacgccctcgagctctggcgagggcagcggcggcggcggcggcagtggaggagcgaccggtcggtcgagcggcgagcggaggcgctcgcgctcggccgtcggctacaggcatgtcgggtcgggctcggcggtcggtgccgtctacgacattacattttacggcgcagtcgtcgccattgcgatcgataagggcttcattgtctctgacccgctccagtgcgttccgtctccaatcggtcggccttcgtgaattggcacgagctgacacattctgcgtttcatcgcaccgctggcagcctgaccacaagcacgcctaacgtgcctaccttcgtcgactcggcccagctcaagcccgtctattcgacgctcaaggcgcgcgtcgcgagcttccagccgctcctgatgcactggctcgacgatgagacggccatctgcgtctttgagacgggctgctgctgggtcgaccggcggggggcggtcgccaagagcggagtgagtgggccgatcctccagacccacccgaacgagcgagcaagcgctgacgagtgccctcccgaaccaaaggcctacatcacctgggagacgcgcgcgaccgccgccgtcgtccgcggccgggcgctcatcctctttgcaaaggatcggcgctacgtcaccgtccacgatgtctgctttggctcgctccgccaggcgaccgagggccgcttccggctcgtcggcagcggcaagggtaacgtccttgccgttcagggcgagaaccagctcgttgagctcctcgagacggtcgctctcccaatgacgttcccagacgttcccgggcaaggggtacatgcgatttgaccgatctttcggatcaacacgaaactgtgcctgactggtcgcctaggaccagtggagatgcaggaaactagtctgccggcgatccggtcacagggacggccggtaaatggacgggaggggggtccggggatcccgcccctgcgcgggcccacaactttttgtcgagatcttatgcgatcactacgagaccggtaccgccgggttcctacaactcaggagaggtagcccaaacttgtctggaggcgatccagtcagatggtggccggctagccaaaggggcgggggatgagagcgcgcgggtcccgaggcgcaggtcgctgggctgctgcgctcgcctgcttcgccctgtcgcccgcctcctcctgcctgtcgacgaccaccttcgatcctgagagcagcaagagtgtcaagagggtcagtcatacccgtgctatcgttgtaggccggcgtcggggtgggtagggaaacgggatcgccggcctacaacgactgtctcttatgtcgccacgggtactgacacttgcctcgtatacgccagatcatcgccatctgggaggatggcttcgttcgcgcacatgcagaccgactccgagcggcgtttgagcccctgctcgctggacagaagatagaaggtgcgtgctcaaggaccccggctgttgccctgctgccggctgacctaacgtccggccttctgttgtgtcgcgcgctgtagatctcgctcgcctgcgtcgcctcctcgagcgcgtcccggatgtattcgcgcccgtccaggagcggttctcttcgctgccggaggggccggtcaccgagtgacggcggcgatgacatgttgttatgaagcgcctctcggacactagaaccgagacctttgctgcctcgctctccgctcaacgatgctccattctctgatccttcgactagcgtccctagtgcctcggccgtgctttccgcgattcgcaagagaggctgagagaagacgtccatctcgcaagattcgggccaggtacacggtagaggaagcggaagaaagacgacacggggaggccaagggtagtggttcgcaggggcaggaggcgtacgagatacagaggggggtcgagatggagagcgccgacggagtagtgcgagcccagaagtcgggaaaggggcggggcgcaacgggagaaatgagccagaggacacgctctacttcttcatcttggagtcgaccttggcgataactgtggaagaaggagcgagagaagggtcagcgcacagcgtaaggcgtcaggagtgagttgcagagacgcactcgactcgacgatcgacgggtcggccagcgtcgagaggtcgccgagctggtcgctctcgccagcgacaatcttgcgctgtaggacagagaagtagggcaaggaagtcaggaacgggttctgtgaagggagaggtgggtccttcacgcaccagaatccggcgcatgactgcgagggagcaaaggcaagaggaagtcagcagacagccttgtacagcgcagacgtcgacactcactcttgccagaccgggtcttgggcaggtcggtgaccaggaagatgccctttggggctagaggacagagaccaaggatggtcagtcttggctgcagacagaagcgggcaagctacagcagagcgctcggagactaaccggcaaacggtccgatgaccttgcgaacctggagcgtgagctccttgaggagctcgggctccgagtgggccgaaaagtcgtactctggcttcatcgagacgaaggcgtagacggcctggccggtgagctcgtcggccgtaccaatgacggccgtctcggagacgccggcgtggacgatcagggccgattcgatctcggcggtcgacagccggtggccagagacgttgatgacgtctggcaggcggggggagagggtcagagccaggtaacaggaggcgtcaaagcaaaagggagggcaacggaccgtcgacgcggcccttgatccaaatgtagccatctttgtcgcggccggccccgtcaccggtgaagtaagtgcccgggtagggcttcatgtacgtctcgaggtaccgggcgtggtccttgtagacggtccgggcgatcgatggccagggctgggcgatgcagaggacgccctcgacgtcgttgccctcgaggacggcgccggtcgtcgggctgcaaaggggcgggccaacggggaagagtgtcagtcgtcgcgtttgagatcagagacgacgcacagcgcgaggacagcacgcactcgaggatgacgggctcgatgccccagaaggggaacgtggccgatccaggcttggtcggaaccgcgcccggcagaggcgtgacgacgatcgagccggtctcggtctgccagtacgtgtccacgacggcgcactcgccccggccgacctccttctggtaccagtgccaggcctcggggttgatgggctcgccaaccgagccaatgacgcggagcgacgagaggtcgtgcgacctgacgtgctcctcgccgagccggcggaggagccggatggccgtcggcgccgtgtagagatgggtgagcttgtgctggtcgacaacgtcccagtagcgcgacggcgtcgggtagacgggcgtcgactcaaagatggtcgtcgtcacgccgttgaggagcgggccgtaaatgatgtaggtgtggccggtgatccagccgacgtcggccatgcaggcatacttgtcgcccgggtggacgtcaaaaacgtacttgacagtcagcgcagcgccgagcaggtaaccaccctgcgcagtcgtcggagtgtcagcgagcctcgcgttatagaaggcacggcaaaggcacgcaccgtcgtgtggacgacgcccttgggcttgccggttgagcccgacgtgtagaggatgaacagcgggtcctcggcgctcataatctcgatcgggcagacggccgggacctttgcgcactcctcgtgccaccacgcatcgcggccctcggtccaggcaatcttgccgccggtccgctggaggacaaggacgtgctcgacgagcgggcactgcttgagcgccgcgtcgacgatcgccttagtcgcaatcgtcttaccgccgcgcttgccctcgctgcgcaacggaagaaggagcaggtcagccgcgagtcgcctgggctgaaggacaaggaagtggctacgcactcggacgtgatgacgaccttgcattcgcagtcgatgcaccggtcgcggagcgactcggccgagaagccggcaaagacgaccgaatggacggcgccgatccgggcgcaggcgaggaaggcggccgccgcctgccaggtcatcggaaggtagatggagacctgcgaggcagcagaagcaaaaggggggagggatcagccagagcccgagcttctcgcgcttggccgggcgagcagcgggagggagcgcgcgcaccgtgtcgcccttcttgacgccccacgacttgaggacgtttgcgacgcgcgagacctcgcgcaggagctcagcgtacgtaatgttgaccgactggccgggctcgtccgcctcgtagaggatggccgtctggtccgggtgcttgaatgcccagcggtcgacgcagttgtacgcagcattcaggccgccctcggggaaccactggatgtcgcccgtgtcgaagccgccggcgcggaccgtctcgaagtcccggtgccagtacagcgtctctttggccgtctggtgcgcgggcgggcgggaggaggcgcgccggacgttttcaggctcgagggcgaaagacgggaacaagagaagaaggtcggccgggctgagcgctcgcgggcgtgacccgccctcccccgaagctccgtcgtctctctctctcggccgcctatgatcgtaaaggtcatcgttgccgtctcatagcctgctccaaccatcttcgcctatccaactctgccgtgtccgtgccgtaagccagcggcgaccgagcttgagcacgcccatcaacaggccaagggcggggcagacccagcacgcccagctcgtcggccagcgcttgctgcgggcgcgccacgacgcgacctgggcggcgacagccgtctgaagctcggcctcagtcccgccgttgcgcaggatgaccgtcgcatagtcgatcttctcggcaagcggcatctgagcccgcatgcgggcgacggcgtcgtcatgtgacagcggcgggttgggcggaatcggcggccgagcgagcagtctggagagctgcgtttcttcgtcgctgcaggacatcagggtcagacgaaggcagtgggggcgacagggcgggtccacggcagtccaagctaaggcttgccacagcggaggagggcggccggggaacgcacacgtagacgacgacgacctcgccgacaaaacgccacaggccagcctcaatgagcagcgggacgtcgcacacacagacgaacgcgccctgaagccagtgccgggcgacctggctcagcatctctcgtcggacggccggatgggtgatggcgttgagcgcgcgccggtcgtcggccgagccgaagacgcgccggccaagctcggcccgattaatgcggtcagactccggtaggaggaccgacgggccgaagcgggcgatgacagccttatacgcttggcggccgcttcagagacgcggacgagcagctgtcggtcagcgagcagaccctcggcgcagctcgacagcccggatcaggcgcgaggctgcttggctgaccggccagacgcacggctcgaggatgtcgcgtgcaatgacgtcggcgtcgacgactggcaggccatgtgtcgttgctagcagcctcgatacagtcgacttgccagaagcgatgccgcctgtgaggccaacgactgatgggcggacgaggcggacaaagagacgggcggtcagccgacgcctgccctccctccctccggccgcgcacgccgggccacctgccatcgcttgacggctggtcccttcgttcaagactgaccgagcataaggtgatagcagctgacaaggtagagggcccgagagaggtcagggagggcaggtaggggaagcaggaggccgcccctccgaaccgcctccgcccgccgcgtgacgctgttaccggcgggagccgggccgcgcggagacgccgccgccacgaccggcccgacgtcctgagctgtacgtcggcctcccctagaactgcgtcaagcgagcgacgggaagaacgagcagaagagggctgacggcaaaggcacatgaaaagggagctgccgagcccttgctgctgaccacctaacactcaccctcaacctcgaagcagcccctccgttctgcccgcagcccgcaccgacccgtcgagcctttcgccagacgtctctcgcgcctcagctcacagcacgacgtccacgcttcccgtcgtcatcagagaggatctgctgcctgaagggaaacacctcgacctccgccaccaagctttaaatgaccctccgcgacatgcagaacgccgctcaaacgcccggcccgacgctccgggcccagccggtcacccatgaggcctttgccccttacggcgaccgtacgtgacggccagcgtgctcccgtcttcggagacgctcgttctgactgtgctcggagacctgcctgcgacagtcatccagggcagctggaacccgtcctcggcaccggcgcacgtcgccgtcaacaccgtgtgcggcccttgctcgcgactcgcgtcgcgacccgatttttggctgaccagagttgccggtaactatgtcgcctgcttaggacggccaaccctcagacggcgtacaagtacaaccggctgtctcggatcgaaagctgtgagtcggccgagcgtcctgtgtctgagggcagcagccctaggctccggcccactcttgacaccctgcctcactgtcaccctgggccgctgtccttcgctgcagcctatcctccggccgccggcgccgttacggcaatcgccgtctaccgtgcgaccccgccggccggattggcgcacggcctgtcgtggccggtgcgcatgtttgagcgtcacgccttcacgacgcaggccttcatcccgatggccaaaggagagtggggcgccggcgtcggcgagcccgccatggcgcggaccgagggcgagggcgggatgctcgtcattgtcgcgctgaacggccctggttagtcctcgtctggccaaccgaggttgaatgggtgaatgctgctcagggaagaccgaagcggcggcggctgactgccactttcggctggcctccagacgaccggccagatctggcgacgctcaaggccttcctgacgagtccatcgcaggggatcgcctaccggatgggcatctggcgtgcgtacaatcccggcactatttgggctgcagcgcaacttggcgcctgcctgcccatccggctttttctgaatctgactgctggtttcttgcgtcgttcgaccttgcagaccactctgtgctctcgctctcgccgaccgactatgccgccatcgatacccaggtgacgaccgactcgtcgacgacggacgactgcgaggtcctccgccgacctgctgatgctgtgccttgggccctggtcgagattccccactacggtcaactggagggcgctttagcgcttggccaggtcgaatgatgtccctgatttggctttcagcggctgctctgcaccaagacggaggctgcggcggccacttgtcaagtcgctagcccagcgctttgaattgtcctccggctgtctaatcggaatattccatgggcgtagacgtaattcatgcagccttccgtcgataaggagctggactttcagtcgtcaactctgccatcgagctccgattcggtctgcggtcacggcacgacccgcagcagcagccttgtcggctcgtctggctggccctgaagggattgcggcgatcgttggtcgctgactggcactcaggcgtaagatcgtcggcagcgtcagatgtgtatagagacagctcggggaactcgtcgagctcgcaatgacgggctttgggcggggcgaggcggggtgggttgactgtgtgctcgtgttggtcgatagcggtccgtcctctgttcacccttttacctcggaaccgaagagatgccggcctgatgcgctcttccttgtctgggcgggccggcagaacgcacgcaagagaccctgactgccgccgctcaactcgctccctttgcgccgacactcctcctcgcgctcccgtcgctcgtcctcccccccgctcccgccccatccgcccgccgccggcgcgcacccgccgccgtttctcaacctctcgtcaagcgccctgccaacgacgctggcgccggccgtcgctttggctaagaaggagttcccgacgctctcgctccttgcgctcgaccccctccgtgcgctgttgctcggcgccgccggccggggtgtgctcgaacgggaggcggggagggggttcgggcggcacctcgtcgggctgctcgctgatgccgaagtcgaagcgggaggcgggcgggccgacgacggcgtcgtcggcggcggcttcggtgaagcagaggcggacgaggagttgctgtcgttgtcggcatcgacgtcgtcgctcgctccttcactctacgcgtacatccgcgatcctccgcgaccgtcaagctcaagcgacaacttgcactcgcaccggcggcagcacaacaagccatgccgcccaggccggctcgacgacgacgaagggccattcgacccgcttttcttcccggcgacggttcgcgctctcgtccgccggctttccacctcgtcctccttgtcggcggccaagacgggcagctttgggctcgttgtcctcggcacagcggcagctgcttctgctgctgccgggctcgtcttttggagctggctggcagtcatgcgcccgacggcggcggcagcggggggagggtcagcagcctcggcctggctagcggcgttcgtctcgcgaatcggggtcgcttgttgacgaccttctgttctcctcccgttgtaacgcccgctctctcgcctgtgtttcctgcccgaccttgaccgtgctcttgaccgcccccacgttgtaacccccctttctgatgcttggggtcgagggccggccgtcatttgcgacgagtgctggctccgatccctctcttgttcgcgttgtatgccctccctctctctcgtgatcgccttatgtgaatgtcctttgacgacgacggccaggctaggagtcgaggacctagcctgatggccgagggcaagggaggacgaaagtgaaaggcccggcaagccgttcatgctatcggctgctgctgctgctgctcgtcagcgacaagcgactcgtgcttgacgacctcgcccttttcgtcgagcgtcagcttgaagagcgggacttcttcctcctcgtcgccgtcgtcggcatcctcgttgtcgccgtcgggcttgccgctcgtcgtgttcccgtccgcatcgaccgcctgcgtcgtcgtgctactcgacgacgccccctccgggtccgactttttgtcgttcagaatcatccggccgaccaaccacatggcgacctcgcctctctctgccctctccgcctcaccgaccgcgctatagcccgcgccgttccggatgtcgatcagcgcgtcgcccggcgagtttggggcgaggacaagggctttgcagagggcgaggtggccgttgagcgaagaccagtggagtggggtcgaaccgctcgagttttgggcggagaatgcgcgggaagagaggagcgggaggaggtagtcggccagttctataagggccagaagggaagacaaggtcagtacggcaggtcgggaagactgaacgacaggtcgaggaggttaggagtgcgcagcgcctggccatccatccgctcttgccagcaacctcgcccctttcctccagcccagacccccatagagcaaagccaagaaacttaccgaggtgtccgttcccgcagatataatgcaagcccgtcgtccccctttcgtccttgacgccctcgacgaacgcctcgggcccgaagctgtcgacaaactgccgaagctcggcgagctcgccaaagcggcacgagaggaggacgtcgtcgacctcttcttgcgagggctgggggaggggggacatgtcgagcgagcgggttggatcgtgctagggcctttgggtgtcggggtggtcgttaggtatggtcgtctggaggatcggtggacaggcgggctgacaggggcgaaattccaaaggggcgctgcgctgtgcgggagcgacgacgacaaaggacgacaggttagacgacgaccatcttagaacaagacggccagccagcatcgggtagcacgagcagcagcagctagcagctagtaacggcaccctacgccagtcactcttaatggactcgccctcgcgcctcccgcacgactaccggccgaagcagccgtcgctcctcgcccgggccctgtccaaccaccaaggctcgcccggcccagcagcagcagcagcgaccggctcgcctcggtccgggacgtcgactggctcctcttcttcatcgcctcccggctcgcccgccttctcgagcgcatccacagcagcatccggctcgttcgcgacaccccctcgtgcccgcagcggccgccgctcggtctaccacccgccgagcccggcgagcgtcactagaggcgggagcacggtcccctttgactttgcggcaagcgagcgggcggctcaagcagcgcgcgagagggaggcctcgggtggggccgccgcaagaggcgggcgggagatggtgccgaggcggcgagtcgtccgaaggaagagctacgtccagcggtgcgtcgtcgcccgctcgaccttccttctccggtttcgctcgagactgacgcgtcgtgtatttctcgattggcttacccagcgtcaaggacctcccgtcaaccctcgccgacacactcgtctttttcacgctcaaccttaacctcgacgccctcgctcggccgctcggcctcgccctcttcggactccagttcctcctccgcgcgccattctgggctaggcggcaggcgggagccgagggagggaggaagagcgtgttgcgcgcggcggggagtgtgggcgttggaggaggaggaggggggagcgctgacgctcgtccacaccaagacacttaagatgacggacgacgtcctctctgtccgctacacgcccgacgggcgcttgctcgcaatcgccctgctcgactcgaccgtcaaagtcttctaccaggactcgctcaaattcttcctctcgctctacggccacaagttgcccgtgctcgacatggacgtctcgtccgattcaaagctgctcatcacgtgctcggccgacaagaatgtcaagatctgggggctcgactttggcgactgccacaagagcctgtttgcccacgacgactcggtcatgcaggtcgcgtttgagaaggacagccaccacttctggtcggtcggcaaggacaaggctgtcaagtactgggacggcgacaaggtgcgcacagggagggcccctgcaattgagctccggccccaggactgaccccccttccccccctcttcctcgcagttcgagctcattcagaagatggacggccaccacggcgaggtctggtcggtcgccgtctcgcagcaggcaaagtttgtcgtcacgggctcgcacgaccggtcgatccgcgtctgggagaagacggacgagccggtgcgttccctgcgtccctacttctgtgctgccgtcggctgacgcacctccctgtctttgcagctcttcctcgaggaagagcgcgagaaggaaatggagcggctctatgacgccaacctggccgagtcgctcaaccggacagacgcctatgacgaggacggcgccgacaaggccgaggcgagcgaggtgaccaagcagacgtccgagacgctcatggccggcgaaaagattatggaggcgctcgacattgccgacgacgagcgcatcacctggcgcgactttgaggcggccaaggagtcgctcagcccggcccaggcggcgctcctgcctctgcctgagcccaacgcgctgctcaaggtgatgggcgagattatgcccgagcagcacgtcctcaaggtcattgagcggattccgaacgcctcgctccacgacgccctcatcgtcctacccttccgctacgtcacctcgatgctcgagtgcctgagcatttgggcccagaaggtgcgtcttcggtgccatcgctcctgcctgcttgctcgagcaaacccgggctgacgcccctcctgcaggagtggaacacgggcctgctctcgcgaatcctcctcttcctcctgcgcacgcaccacgcccagatcgtctcgaacaacgtcatgcggccgacgatcattgccctcaggcagcacctccgctcggccctccggcgccagaaggagacggtcggctacaacctcgccgcactaaagtttattcagcgccaagtcgagtcggactcgaacgccgagttctgggagagcggcgggactgaggaggaggtgcgcgagaagattgaggagggcaagaagaagcgcaagcgtgtcatcatctaatgccaacttgcgagccgaggacgagagagtcagagagcgttcgtcggggcgtcagtcgcagggggctcgctcgaggcgctgacgttcgcaagggcattaaaggggtcggttgcgcgcagcagcagttcgaacccttcgcgcgagtgctctgtcagctctgtcgagcatctcttcctcctcgaccacgacctgcgcttcagcttttggactcgtcctttgccagcagctcgtccgcctcagccgtcgctcggtgcgtagatgtcgagcctgacgtgcaacgctgccatcagcgcgagctgacgcgctccgagctggccctccttttgacacctgcagccgcctgctcttctggacctcaagtccttgtcgccggcttctttcgcccttcacccccttgcttaaactgggactcctcatgctgccggaccagagcatccagtatgaccacttcaagcagctgctcgcctcgctcacgcgacccgagctgcctgacctcccagagccgaccggcgaggccgccgagaccgggaaaattcacaagttgttcctcgggcgcacgaggacgaccttcaagcgcgatccggcagatccggtcgacaacgagatcctcagcgtaggtcctgcagcctctttcgtgtctgatttgaagcggctgaaagggctttctcctgtccgcagctcgtcggcgacaatattgtcaagaacctcttgacgaccctcatgcgtgagtgggacccttcgctctagcccggagctgttacggggagcttgcgatcaagctcgactctgccgctgaagaccttggtgtcaacttgtgttctatctgtcgtcgcagagctttaacggcgcgcttgagttcaacgtcgttcacgcccggctcgcctttctctgtggcctgccgcctcagctcaaggcgtacggcacgcaagcaaacacgatctgaaacacgcccacacagcaggccgacctcttcgaagcgtacgtcggcgccgtcttcgagtcgctcggctacgaggcgaccaaggagtggcttgaccagctgtatcggccgcttctagtggccacgaccgacctcgtccggggagtcttcaacgcgccgactgtactcgttccaaacgacgacaagaccgacctcgccatagagcctgccatcctggtcaacagcaaaacttgcgtgcagtgacttgaagaatgggccgcccagcaaagcaaagcgttcggccgccctcaaccccagatcaagtataaggttagcctggactcggagacgccaaccgacgaagtgacgttcaccggcacccttacgatcgatgacaagccagtcgggccggccgtccggggacggaccaagaagctggttgagcatcagtcagtcgcttcgagtcgccagagttcggcaaccagacggctgacgctcttcaccggccgcctcttgtcagactcgcgcacaatgcaatggagcgcattaacgcgaccggcggggtctggtgcgtccattcccaatcagggcgactgaagctgaccttacgcgccactttccaccttcaactcgttttgccggccggcaccttcgacctcaagacgttcatcaccaaccccgaggtctttgacgtgtcaaacgggatggtcaaggtgctcgaggggcccggactcggtgcattctgcctgccttcctgcgccgttggtcggtcgtcgtcccacattaaaggtattgttatactagacaggcagacttttgttttgattaattagttttttttttttttcaagcagaagacggcatgcgatatgagcgctagtctcgtgggctcggagatgtgtataggagacaggcccgaccgcaaaagccagcagcccatctcacggacgaccgtctcgacctcgtcgagcgcaaagaccgtcttgagtttctctgcgagcttagctttccgccgccagcggtcgacgtccgactcgccgcgcggctgcttgcgggcgttgctccccgcgggcgcggagtgggaggtcgaagagctgaacgtgggggcgagcgagttggccggcgaaggcgcacgggtcgacccgtcgcggccaccgaggaggacgccgggcgggggcgagggaacacgggcgtcgagtgcggcctgctcggcggcgatttctgcccgctcgcgccgccgagtaagcttgcgtgcgtgagccgagtcgtccgtctcgccctctgtgcccgtgccagtcccacctgttgcttgcttgtcgtcgtcgccagcgccgctgccctcgtcggagaagccgtcgtcgtcgggacggccgtccgtttgattcccatcctgcacgtcgaccttctccctcctcccgccttctccccccgcgcgctccacggttcgcgtcttgaactcccccccggcctttgcaggccgatgccggacgccctcgacccggccagacagaccagccgagacgtgcccggccgtgatgtcgcctgagcgggcgttgaggagcggggcgtcgcggatgcgtgggcccgagggggcgacggcgacgtgcttggaggaggcgagggcgctggcggaggagaggagggcagagggtgaagagcctttcgggctcgaggaggaggcggaggcgccaaagggtcggctgacgtcttcccccgatgaagctgaccgccgcttgtcggcgctcgtgccccgcacgactggcccgtctcggaccgggctgtcgagtccggcagcgtcactgtggcggcctcgctcgagctcgggtgtgtgggccgagtcgggccgctgctggtgcggggaggatgaccggcctcgccagccggcgcccgcgccagcagcagcggctgagcgtaaaccctgctccgcccagaaccgctcgtcaccagaagcagcatctgccctcctctcgccctcctcaccgtcgtcgtcgtcgtccgaggacgtgtcgtccccgtcctctccttccgaggcggacgagccgccttcgtgctcagaccaggggacggcggagagggcttgaatgagcctgcgagcgcaaacggaggagcgggtcgggcggtgcaggcaggtgagcggacagagttgcggatcggcggacgggcgggccagagccaagcgagcgtgcgagcagacagagcggaggaagaggaggaagaaagcgaaagggacagagcgtcaatgctagattggcagaggaagagagagagagagaggcgcagcggacacagcaacggaagcgaagcgagccccgcgcgcacgcgcgcgcatgagtgagccacgctcgctcactagctcacgatcaaccctggctcgctcgcgagctcttgcgacgcctaagaagagacgaagggagagaggaagtggaagacgtacatctgcgatccggcgcgcatctttgatggaggatgcccgagagagggagcaggagatgacgatccaccgggtgtgagaggccgcgggcgggttggcagaggacaaggaggaaggaggagggacgggtcgggcgcgtcggatgacgacgacgacgacgacggtagatgagagcggccagagagagcggatcgatgaaggcaaggcgagagggcaacgagaatcagaggaggagaggatgaggaggaggagggcgtgcgtcagctctcgccgctcgaatcaacgtcgtcggccggaaccgcccgcccgtgccactcgtccttgagcctccctcctttccctcctctccctcgagcgactgaccgagttgctgctgacacctatcggcggcctcatcagcggcggcggcgcagagtggtcgacttggtgatcgttcgcgccgccggcagacggcgcaggcggcagtgatagcctctcacccgccgctggcgtgaagccaaagtcgggccgggcgtagccgtctggcgggggcgtggcgagtggcggaccgaggggtcttgcaaagtcgggcgagggcgggcggtcagaggccatcattgtgggttgggtgggtgttttgggacagcaggaaggaaaggaggggacgacgcccgctggctggctggctggctggctggctggccggatcgagggcccgccccgggccgacaagatgacgcgcggccgatcgtcgcgcagcagcggccgagcgtcggccagcaaccgcaggatcaacggccggccgacactctcttgcccggtagacggcgtgttgctcctcgtgcccttccttcgcggagagtcgacacgtcactcctcctcctcctctccgtaattctcgtccaactcaatcaccacccgccttttccccagcctggcgccgcccgcccgcccgcagcagctcgcccgaagaaaaaggggcaaacccagctctcccgatctgcgtcggtcggtcaaccatgattcaaagccgcctaggatcgccggcgctcgccacactcgtccgtcgactttcgcttgtcccgaccgaccgagtgcgtggaaaatcgtttcgcctacgctcgtctcgctttactcgtgagacgactaagtcaacggacgaaggacgatgaaatatccatcgatcgggaatctctcgaccctcgcctcatcacagaagacgagggccgaagaggtaggagggaggtagggtgggcccactcggtgtactagaccggcaaggccagcagggttagatcactacaaaaagagagagagagagagaagaggagttgaaacgggtctccggttgaaggatgatctcgttcgcgtgctcgttgttgaaacaagggagacgggggggggggcgttgaagtcgttggtggtagttcgtcagagaaaggatgaggaagtccttttaggtgtgtctagggtgatggatgagcatgcgtgggtaggaagggagaccccaaggtctgctcggagactcgggaccgtccggcggccgaggtcatccgctcctttgttggccccgcgctgttcaacccacgggacccgcatgtgttcatgctcgtgctcgcaatccttgactatacttcgccggtcggtatccttgccgaggacatgacgacgcacgccgagcgcaaggcggcgatcgaaggccgaaccgacgactggtcgcggcttctcgccgagatgccggccctccttcagcggtgcgaggacgtttacgacgagacgagggcggcatcaaagggtatcggcgagggtgaactcgctaaacagctttacacgctcggcgactatccggaggaggtcctgaattacctgcgcaacatgcacctgccgtcgccagaggggttcggcgatcccgatgtgtgggccgagcagaccgagggggcctgggaagtcatcagagagcgcgagggctacaattcgctcagcggatactacccgttctactgatgacctgcagatgcttctttccggattcgtgtcgacgcgactgctgcacaagttcgacgctgaagtgcaagcagaagaggagagggtgacagcccactagcctacgtccacagactgttgcaggccctcaggccctcagaccaccagaccggccgacgtcacctgaccgtactacagcctttgacctctccaaatgccacaagtcgcacccatcttggcggcatcggtctccggcccaacgaacgacgcgtcgttcgtcggtcgcctttgttgggccgcgccagacgatcgcaggtccgcgctcttgcctgacgctgccgtccagaaccaaacgactcaccaaagcaggcagacaggacatggctgccaagccctgtcatcgtccatctgctgccgcgtctctcttcttgtcgacgcgtctggctgttgacgaggcgatggcatggtctcgccgggccgcatccggacgacgcgactcactttggccgccgcgcagcccccctctgccaaactccgcgggcagaatcgaaagacaaggccaagccccgtcgcgtcttcctcttctttacgcccatccccctctctcttcttccttccctccttccttccacctgcttcgctcgctcgctcgctcgctcgtctctccggtcctcacactcactctctcctcccagacccgcactcggacgctccttcagcacctgccagccagcccagccaccagcccttactcgcctcctcaccacccctcttacacgatgctcgtccctgccggcttcctctcgaccctcctcctgaccgcctcggtcgcgtccgctgctggccacggaccgtcctcggccaagcgggccaactcccacaaggacaaggctgccgccctccgccgggctggcacggccgcccacgagcgctcgctcccagacctcgcgcccggccaccacgccgtcgccaagaagcgtggcgagaagcgctgcaaggtccgcaacgcgcccgtctcggccgccatggctcccaactcgtcggtccagccggtcgattcaatgcccaagtcgtcggccgctgccgccgagccctcgccctcgccgtcgtcctcggcttggcaggagcctgccccgacgccgacctcggtcgtcctcaatcttgccgtccagccgacgccgaccaccaagtgggtcgctcctacgacttcgtctaaggccgagtgggtcgcgtacgtcccaatttttttcgcgccttgttggccggcttccctttgatatcctggcgcggcgcactgaccgcgcgcgcgccccccatctctcccttcgtccttcagcccgaccacatcgtccgccgtccccgtcgcctcggccaagcccaacgctgagggcgtcgtctcgggtgtcgtcggctcgctcctctcgctcaccgacggtcgctgcggctggtcgggcgcgaccgcccactcgtcgaacgagggcgggcccaacggcgctcagagctggctcaactgcggcctcggcaacggtggcgcgtggacccctccgtgtacgctctttttttcttttccgcttctttcgactgtcagtgactgacttctatctcctctctgaccgacagacatcacgctcgacgaggtcgtctacgtcgacctggccacgaacctcgccagtggcaactcgcccttcagcgcgtgcgcgccctatgtcgaccagatgtacgccatcggtgccgagctcaacatcccgccgatccgtgcgtcgccttgtcgcagcccatctctctgccggtcccagactgacctttcccttccatctctcgaccgccttccagtgatcgcctcgatcgccatgcaggagtcgacgtgcaacccgtcggtcaccggcggcggcggcgagcagggcatgttccagatcacgcccgacaagtgcggcggcgcgcccggcggcaactgcaaggacgtccacttcaacatgcggaccggcatgcagtacctccgcgacacgatctcgcagaacggcggcgacttcctcaagtcgctcggcatgtacaacggctggcagcccgagcgcatgacgatggagtcggcgaccgccgcccgctacacgtcgtgctgccgctgtcagaacaacctcgactacctccaccagacgctcaacggctggctccagggcatgaacggctactcgatcgtgcgtgccatcttgcttccgtcgccgcaaagaccaacaagctgacgctccctctcccctttcgacgacagggcacctactggaacctcaagacgtgctagacgcacgcgctttgcaggatccctctctctctcttctgcttctgcactttgcctcctcctcacgctaccccacacacctgcactcacttgtaacgactagcggtccgatgacgaggcgaactggcttccctcgcgtcccgcacccctgcctgctgcccctttgctccccctcctctggccccgcgcagcgcgcggggtgctctcttaccccctcttcctccggatctggttatctggaaacatgacttgctttttgatttcgccttcgactgcgagcgctcaagcaccagcaggtgggtggcctgggtgatgatggagggtcgctcggtgcagctggcctaactcgacgtgttgcaggcttgagcaatttcgcatacggtcttgatgctaacagcgcggcgccctatagaagccctacaaactcgtgtgtgcgtggccacaacgtgtcctgcgaggttgtgcaagagggtacgtcgtggcggtttggcgggcggtcgcctggcgccggcgcgctgcaggcggccatcgacagcgcgcgcgcgccaggcgggcggttcgccgaccccggttcgccgctcccgtccgccgtccgcgcctgcaaactatttcacgaggcaagaaaaccaaacgtctggatttccttccctcaaaagttgattatttttttctcatccccttttgagcctgccgcctgcctccctctgtaaaaacctgctcaggcgcaagcttcataaatattaagcgttcacccgattgtccctgacccccttaagaaccgtgacacttcaacagaggtcacttccaattagggggtgccttcttccgtcgtcgtttctcctagactcgctccaagttgccaagcaggccctcaactgtttgaaatgagggatcggagtcaggcagcaatcagaaacggtcgtaaatacgcagcgcacgaagcatagcgttcttagcctgcgcccctttcactggcggtcatgaagagtagagttggtcttctatatggcttcgtatacggaagaagcttcatatatcacatacatgcaagcaatcgcttcgaccatatgaaggctgccctctgcgatgggagttcgtgggcgcaacttgtccgactcgccggggggcagatgcttcggtacgcggctaaatgaagaagggggccttagccttgctggcgtcgtctcaggatgacgagattcatgtgcgttggagacgagatcagcaacggggcatactataccaatatgtgatacaggacgtcagtgtcggcaaggcgtctgagcgcaagagagagctgaagtagaaagggagcaggaagggagggcgagattagtagctgatgcaagacatgattatcataagtaaaattgaccagattcctactagtcggagagatggccgagtggtctaaggcgctgtgtttaggatataaatccgaaccgcagtcttcgggcgcgggttcgaatcccgttctcttcattttgtctggaggtcttctaacggatggggagtcagttttattgtttcccactgcgagtctcagcctttgtctgaggcatccgcgctccgagcccccctgccatcctgcagattcgcgacggtaacgtggcccttttcccaactaaccgttcgctctcattgtcgtcgtcttctttacccctcacctcatccagctcgcttcttccgccaatttacaaagcgacgcgtgcgatcggtcccactgcaaagacaaagagtcgaaaacactgccctgcacagcgcgtgctgagatcgcacaagctgaaacaactgtcgcgagctgttgctcttagtcttctgccaacaatgcgtgatcaggcgacttgttcccactgtacgcatacgatgttatgcactttaagtcagctctcaaaaccatgcgcattcgatccgacaccggggggccctgctggccgcgcagaaggttcttgaacgtattgagcgtaacgctctcaggcacgagttcggcccgctgaagcttgttgtagatcggctctagcttcatgctccgttgcgtcctgccggagaactactaatgcctaccgaacggggtaaagtacgtgttgccctgtagcacggacgacctggtatataacgctgagaccacccggaggagggtactggtaggtatactgtagtataccagtacacatactggtatggtaccgatatgtcataccaagaccaatactggtagggcaccagtatacctaccagtagcctaccagaaggcatactgatatgatacaagtagcgaccctggcagtaccataccagtaggcatatactggtatggtactcatatgttccggatgatgtaccagctcggcggctgtgtacagtataagaactgcaaaaaggacatgctacagtgcggtcttccttctgtcgaggctgcatcatgcattgcctgcgggatgcgaaaatgtgcttggaatttgagaggcgcgtccaggctattgccaaacatggactcgacgttacggtgcttgcgaatccgttctcggcaccgattttttttacggtcagccgcgctccgccgacttgggacagaatggcatctgacatcgaagtcatcgaaggccaggcgatagtccaaaagcgccgccagccgaagtctggcattaaggccctcgcgatcgacgagattgccaccgaagaggccgcctttgccatgcagcacggtcagcctgacgacgggcggatcatcggcctcggcaggagacaattggggacaccggcaacgctttctcaaccatcaaggccttccgcgtgtatgcacgcaacgtcgtcgatggcggcgggcgcaaggcgaccgaggccgcccttgtcaaacattcgcggcggacaaacgacaatcacgcctcgtagacccagctgacccagggcagatccgtcaataaatagccttcaactgcccaatcacctcgaagaccctctgctccgaacgtgtggccgtggtccaccgtgcccgcagaaaagggcagaacgcacgaccgccgtccagtgcgcctcgactgggttctcggtgtagcgcgagggtgtaagacgagacaggaggcagggcggactcagtctcgggactacttcgtgaacgactgaggtataggaaggggagcgaccaggcgtctagctacaaggaggaagcgaaaagagagaaggagagagagtccggcggaatgtgggatgcggcgtcgtggtcgtcaggcgctggcggcgtgcccgcgcagcgcgcagcacaatcgcaacagaggggacgcccgaggagacgccgatagtgtgccggatatcgggccgggtgctcatgttgaacgacacggccttgcaggggacaaggcagtcgggtgaacgcttaagatacatgaggacttgcgccttgaaaattgctatgagggaggaagccgtaagggcaagagagtgatgttacggaggtctccttctgccccgccatacccccggactatgtcgcccgtctcctctcagcccttgatacatacaccggccccggccactccaagcatacccctttcctctctgtcccgctatctgcctgcttctgcctccggacgacggtcctttaatctcgatttcagtctgtgtcgagggcccgtgtccaaagcgactagaatgtttggcgacatccctcgctcgcgctgcattcctcgcaattggcacactgcagaggctgatcaatcaccctccagctgcggtgcagggaccgcagactcgtacaagtcgtcaagaagaatcggcggacacggctgcctgcgctgcggacgagacgctcgcgctgcagaaagcagtggccttctgcccagtcagctacaggccagagtcaaccttctcctgatcagtcgtagtccagatggaggtcagcatgggaggtgtgactcgtttggctcgagtggccctgacgacgaactcatcgatgccgcatcgacgatcggacgcagaactccgccctctgcgcagggctggagagctcgacgcctccgatagttgaccccaaccttcaccttcctctctccctctctaccaacccacaccagactgcagcgcatggcgtgcccaggctccagtcgatctgttctcttggccctgcgccggtcggcggcggcggtggcaggcccgtcgacatcggcgtcgtcgtcgacctgctgcttcggagccgccgccttcctccgacttgtcgcaactcgcccatattcgtctgtccctccaatggcctttgggcggctcgcacctctccagacctcatcggcaagtacgagcagcctgatccggcaactctcgaccggccggtcactccgcttcccggcagcggcgctcaatgccggctcgatcccgctcgatgcggccgtcggctcgtccgtctcgtcgtcgcccaaagctcgctctcggacggcaccgccgctgtcgacgcccaatgtcgcccgctggctctacctcacgtcattcctgacgttttcgatcgtcgtcatcggcggcctgacgcgcctgaccgagtcgggcctcagcattaccgagtggaagccgttcaagggctcgctgccgccgatgaacgcggccgactgggccgaggagtaccagaagtaccaagagagcgaggagggccgcatgtgagtcaatcttggctgctgctctctcagaaactttgggtacaggattggcctgcccgatccgagtcgatccgcgcttcgcgtcgagagttgctgacgacgactcttccgttggctgccctgctgcgcctcgcttctccgcccagtatgaacgccgccatctcgctcgacgacttcaagttcatctttttcatggagtgggctcatcggaacctcggccggctgctaggcgtcacatttgtcgtcccggcgctctactttaccgctcgcggcaagatggcccgcaaggatcagctgaaggcgtttggcctcgcatgtggcatcggcttccaggtgggtccttcctgtcgctctctcacctgccatccgagctcgactgacatccttctctcgcacccagggtttcctcggctggtatatggtttcgtcaggtctcgacaaggagcacctcgccgcccggcccaactccacgccgcgcgtctcgcagtaccggctggcggcccacctcggcacggcctttgtcctctacctcggcatgatccacacggcgctctcgatctcgcgcgactgggcgtacgcccatggcttgaaggtcggcggcgagaaggctggcgcggggaagctcgacgagatgctcatccggggcggggcgaggctcgccaggttccgaacgggcgtctgggccgtcggcgggctcgtcctcttgacggctctatcgggcgcattcgtcgcgggtcttgacgctggacttgtctacaacgaatggccgacgatgggcgacggctatatcccgccgacggccgagctgatggacgacgcgtatgcgcgcaaagccgacaagtcggacgcttggtggcggaacctgctcgagaacccgacgacggtccagtttgaccaccggatgctggtgcgagcccccctcccatgcctttcatcgcctcctcgatccatatcttttgctgacactgctcttgccccctcctcgtctgcaggcctacacgacagcgacctcggtcttcgtcatgacggctctctgcctctcgcccgtcctccgccagcgcgtctccccacgggtccgcaagctcgccttgctcgcctcggccgccgtctgcctccaagcgaccctcggcatcaccaccctcatctacgtcgtcccgacgccgctggccgcgagccatcaggccgggagcgtcctgcttctgacggcaatggcggcacttgcggtcagtctaaggaggccgtcggtcgcggcgaggcaggtcagggcggcgctggccgttccgccggtattgaagatgtgaccgcgcttatagaaagacgctgcactactctctgtgccccggtcggcagggcgggctgagggaccgcgccgctgctgtctatcgacttagtttcgagagcatgccaccctgtcagacccttgcgtttccagcccagcttgcctcgccgcaccaaacgcccgcacgaaagagtcatgataacaccccccccccccatcaactctcattccctaacgagctcgacaacgaccgcccgatggtcgctcgtccggccccgccagcccgaccgatcgccatcgagccagttgtcaagcacactatgctctgcaaccgtccatctcccctcaacggcctcgtcagcggcggtcttgccccgcggcgcggcggattcgagcgcgacgacggcggtggaccgggcggacgaggtcgaaaagagaaaaataaagtcgatccggctcatgctggcgccggcgttgaaacccgagtacgtctcgcttggtccccaaggctcataagcgagccttgcctgtttgcgcgtgagcggcggcgagccggccggtgggcggagcgaaaggagcgtgatggcgtcgtggaaggccgggctagggagggacaccagcgcgtgccagcgggcataaagtcactcacgacgcgctctgcgagcctgcccgctcgctccaggtcggtccccacccgacgtgatcctcgcctccgaatcgctccgccgcgccgcctccgccatcggcgccgtctcaggccgactcatctcgtccgaggacgtgctcgacaagctctttggggagttctgtatcggtcagtcgtcgttgtcgtcgcgcgagcacgagtctgtacgtcgctcgaacttgcgcgcactgacgctctaacttgactttcgcaggcaagtaaaatcagaggtttagcctaacgaccgggcctcaagccatctcggcgaacgcccgcaaacgtgcgcgtccatccccagtccagccccagcaagcgtccgaccagccgccagcccagagacgtcccccgccatccctcgaccacagcgctgtcgaccgctcgaggggcccagctctcgatctcgccaacccaagacggccctgccgaggtcgacgggcggcagcatcttcggcgcgcatcaagacgctgcctcgcctccgtcagcattgacatgcgcgcgacagcctagctgagatgtctgcttgcggacggggctcggttggagaggagaagggagcgaaaggaaagaggcgcgcccaccgaacggcgagcggccgagtgcaagggcaggaggggttccgactgaacagccgcccccttttcgacagactgcggccagatcggatggaagcgagcgagtgagcgcgcgagcgaagaggcgcgctaagggcgggagggggaagaacgaacatcgcgcgagcgcgagaaggggcgaaaccaaagggacgagcaggcaggcaggcaaggcaaggcaaggcaggcaagacgcacctgcgcccccgcaatcgacttgtaaacctcgaccgggtcaaagcctttgctccggagccgattgaccgtcgcggtcccgcgccgatcgagctggatccagcggaggaagggctcgtcggccgtgcaggacgaggtgaggagccggtggtgcaggcggttgagcgtcctgggccgagcgcgaaaggaggagaagagggtcagcttgggtaacagagaaaggagaggaggaaggaagtagagggaaaacacagaccgtaggtaaagcgacctccaggccctccccttcctccagctgtccgcacaccagctcggcaagaaccgccggcgacagacctcctcccactcctcttcgcccaacccctgcgggagctcgtaatcgaacaggacccattcggcccgggcgagagtgagtatctcgagtgtgacgcttggtgggcagagcgattgggaggagagggagccgagttggtgagggtagggtgctgagtcgaggaggagggcagggaggagttggctgtaaggatggaggacgggcgaggcgaggagggcctggaagaaggccgaggctcggccaagctcgctgagggtctcgagcgggagatgactgaggacgagcgagatgagctcgggcgggagacgcggcgagggagacatagtggatgatgggaggaagcgatggctcaagcccagaccgacacgcggcccgggccgaaccccaccctttttattctttttctcatccctcacttcctcctgcccgtccgtccgcagctctccctctctcctccaccctcaacccctctaacatgtcgcagctcctcccgcccatcttcccagacggccacggtcagtcccttcttcccgcctttccctccatttcctctttctcactaaacgcctttcaactgccagagcccgtcccgccagggacgactcaggacgagctcgaccaggcccgccagatgaagctctttacaaagtacatgaacgtcggcatggagtcgtgcgtttttaaagggacgatggccggcgtcatggggtgcgttcagtctctctctctctctctccttctctctctccattccttcgctcgctcgacctgcgctcttgccccgcgtcgccgcctctcgggccctgcacctccttctcttcctccgcttcgccgcccaggccaccccctcgcctcctgcgcctgtccctcctctccgtcccaattcacctcgctcgattcgcctgcatggccgccgtcctccctctcacgccacaccaggcaccgccgctgtccctccagctgcacctgcagcgccgccagacctagcccagctccagccctcccggccagccgtgcgcgcgctcgctcgttcgctctcccagcagccagtcagctagcttcagctctggcccgtcttgcctccgcttgctcggctagccaagccagccagccaggccagcgaatcggccagcccggccagctcggccagcccttcagcccggcttcgcttcagccagcttcggctgagcagctcttgctcgcccgtgtcactcggccagcagctagctggctacttagccggtcgctggcaggcaaacaggcaggctgccaggtagcaggcaggcaggcgggcagggagtcgggcagggactgattcgggtcgagttgacgttcgaccgtcgaccgcccgactgggctgagcgagcgagtgagcgagcacggcccgcctgcctgccctagctggcaacgcgcgcacgcgggctggtggctggcagcaaatcggcgaccgggcgagcgagtgggcggcgcagagtatggagggggtcggattggagctgcgggttgggcggggcgggtcgggacaagatgagtagcgtcggggccgagcccgagctcgagcttcgaactcccgagcgaggaccgagggcgggcgcgggtgtcgatcatcgtcactcgttcaacggtcaaccgacgctcggcgacgtatccggcctgattacgggggcgtgtgtcgtcgctgaacttcgagcgggcggagacgggtgtgcgagttcgagccaaagattaggctgagacggtcggccgctcgagagcggcggaagcgttcgcttcgcttgcccgctggttattggtggaaaggcacggagcgagcagggggccgggggatgaggggtattgacctttcttcaactcctgctcctgtctcgacctgaggcggacacaggaagggaggtcagttgctggagaagaggaggaaagagggggggaggaaggaacggacgggcaggcgccgaatcgcccttcaaccttgcagcagacggcgcagagtcgcccttcagcctcgcggccgacaccggctggggaggggcatacgcgtcgtactcgcccctcctagcgggcggaggagagcgcgagcgacggcggctcgctccgtgtcctccgcttgaggaaccggagggcggcgagcgcgagcggcgcgagtcgcgagggtagggagcgtgctcgcgggcgggaggcgggcctggtgggacggcgattacaagggcgggtcagcaacgtaccgcatgagcgctctcaagcgctgagcaaagaaaagaggacagagagaaagagagagggacggacctcctcgacctccgccagcggcatacgaaggctggtcgaacgcctccctcgtcgacggccggccgtagtctcttggtccggccggggctcgctcgtcccttcctccataagaaggagcgccgcctcctcctccccggctgtagtcgtccctcgctccgccgctgccgtagcctcctcgcccagatcggtagtcgtcccgacctcctccggcggcagagcgcgtatactcgccagcgccgccgccgccgccgtcgcggtggtgatcgcggtccctcggagcgtaagcacccgtcggccgtccacctccacctccagcaggaggggggctccgttcgcggtcgcggccgccaccgtagccgggcggagggccgccgtcgttcctttgagggtagcgtgaggaggacatggttggtatggtgggcgtcgggagggtcggagggggacgaagtcatccatcgcgtcgctcctgccgacgacgacgacctcctccagacttgcatctcgccctcccgtccgctagacgacgacatctacctagctcctgctagcaagaccgtctgccagtactggatacgcgtcaaaggcccttcgtcggcttcactcgtgcgccggcgagctcctcgctctcgctttcgccctcctccgacctggtttcggagtgcgtccggctcgtcgccctttcgccatcagccgactcgagcgagcgagcagtcctggctcgagcgagctctagtcatgcaacattcctcgacgtaatcgcctctgacctgccctttgcccgtcctctcgccattgcaggctccttccccctccctcgacgcgcctacccatcatgtcgacctctgcgccctaccacccacaccagctcctcccacccctccctccgcccccaaacgcgcacggccgggcctcaccgcacccgacctcgctcgtctttgaccccttctcagacctcctctggtcaggcagttcggcaggcagcatctgctcgtacgcctcgcctcaggcgttcaccaggaacgtcacgttccccgcccacggcgccggtggcggcgcggccgactatggcggccagggaggaagggcgcaggggcccggtgcgtcggcagcggcgtcgaatgcggcggctgttaaggcgcttgtcgtgggcgagagggaggtcgtgtcgctgacggccaaggggatcggagggcgaaagcgagggggcgcggccaagtgggccgtcaggtacgtcccctcctgctttcgagaatccatttcggtcgctctctcgtgcccttcacgaaggcggctcctgcgtgcggttcgagcctggggcgagctgctcgcatgcctccaggggagcccgaaagcctctaacgagacgtcgcgcagagtgctgaacccttccccttgcctcgcggctatcgcgcgccatcagtgaaggcgcccaagcgctcaactcaatgtgcatgagcccgtcgaacgggtccgagattatcgccggcggtgcccagccgagcatgatgatcgtcaactcgtcgacgggctcgatcgtccgttctgtgcgttcaccccttctcctagcttccacttcgcctcgacttgcgttgcgctcgcagctcgacgctaaagactatctcgcatccgcccatctcaggtcgagtcgctccccaacattctttacctccgtcggacgccaaagtacctcgcggccggctcggccgacggctcggtccgcttccacgacccgcgaacgctcaagcagacgcacgctttgagcgcacacctcggcgggctgagcgggctcgaaggaagcgggtggaacgtgctgacgtttggatacacagtcaagtgcgtcttcccacgtcggcctcctgcttgcaattgcgcctgaccgtttctctgctgccccctgcaggcaaggccacccaatgcctgacccgatggtcaaagtctttgacgttcggaccttcaaggagctcaactcgatctcatttgagcctggcccggcctttgtccttccgagcgttatcaaccagagtgggctggttgtcgcgagcgcgcaggggacgttcatgtcggtcgatattgaccgggcttgggaggcgagctttcaccaggtgcgtcggatgcgaatcgcttgttggcggtcgttctcgcgcctttgaggctgacatcagcttccttgcgccctcgccccacagcttgacatctcgtcctacgtgacggctgccgccctctcgtcgtctggctcctatctcgccttcggcgatgccgacggcaaccaccacgtctggtcgtcgatcgatccgaacgctgacgccgaagagggcctcactttcaacggcttcggcggcgtcctccccgaataccccgacgagatcgtgccggttgcgaaggttgactggtcgagcctctacacgccgctcaactcgataggcatgccctactacgacacgccgctgctctcaaacctcccgtcgagcgcttactgcccggccggctcgtcgccgttcttcaacccgccgacggacctcccgctcgccgtcctcggctcggcgcgccaggtcgactttgtaggctacgcacagacgccgcgcgagctcaaggggtcaagaaatcgcgtgccgagccgaggacggcgagcgggaggtccgtcggcgggttgaagaggggaggggggaggaggggggcagggacggaaagaaaagcgtcagcgatcccgtgccaaccgatgagaaagccggaagccgtgcgtcgtagcgataggacagaggacgtcgatagcctaaagacgaccgcctgtcccccgccggccgcccaccgacgacgacgatgacgacgggcggaccgcgtagggtcggcagcaagtcctgattgccctgcccgcggttctgttcgagagagcgtagagagaccaagggagcgggcgggcgagcggtagggagacctaaagctggggcatcgcgctccctctcggcccctcgccccgtcctcccctggattcctgcgagcgagaaagcaggagagcaatctttcctcccgctcgcttcaccctccgccagagccccggcaagagagagggagagaaaggagagagggagacgaaccgtgcgacagccggcgctgacggttcatgatgtcctcgccgatgccaacgccgccgcgcgagggggcggcctaggagcgagcgaaggggcgaccggaagcgagcgcaaaggagcggggtcagctctgagcaacgcccgggcgggacgggcgatagggaggtcgaagcgaacaggcttcttccgcctcgccctcgccctgaggagtgaagaggaggagaacgcacggtcgagtacgtcctcgcccgcgaatggacctctgtcccatagtactccctcgcatcgctgttgacggctggaatcagatggcctgcctccctgccctcagccgtgtcgctctggaggccgccaacgggcgccgcttggctctggagggcctgctgggccgggccggcgggcggctggcgcgactggtcaaccgagggtggcggtgcgttggggatgacgtcaaagggcgcgtcaaacgggttcgtctcctctgccacaacagagcccgtcgtgccgtctggcttgatggtcgtctggaagccaggcgtcttgggcgcgccgggcgtgcgcgtaccgctcgcgttgggctcggccgtcgggccggtgctgttgggcgcggccgagtggtcgtcgtggaaaatgagcgacttggccgtgttgagcgtggggcgctgcatgcgggcggcctactgttgtcagggagtggtgattgaaggagaggggagggttaaggggagggaggggctgagagggccagtcggagggagggttgctgcagatgccaacctctggcgtaaactcgcgtcacagccacagtcacgcattacggctgcgtcatcgaaaccgcaactctcgccccgcgccgaggctccgcacccgtccaactgtcttggctcgtcaccttgccctcaacccccaccaccactcctcaccatgtcgtccctcgccctcctctcagcagcagccctgctcgcatccctccagcccgtcgcagcccagaacaactgctaccaaaacatctatgtccgtccttcccatctggcatcctctcagcaccaccactcacctacccacccactgccgccgctgccgctgaccttcttgctacccttcgtccgatccgtcgcccgcccgctcacagggccgcgtcatttgccgcggcggtggactcggctatggcgcacgctatggtattggctttggtatcggtcagttcctcgctttcctctttgctcgttggctggggggtggcgctgcgagggggtggtcaccggagagacataaggggacgccacacggccgatctgatcggccggagacgaggcggtcatgagcccaggatggatcgagcgggtccggtcttgtccgatcggacgctcagcatgcttttgcatgctgcctgcctgcctgcctgtactgctcaacccgccggccatggttgtcctcgcctacctctcctccaaccctaccctgcccagcctagctccactcgcctatccgacaaaccctggaactgacccgaactgtccccccccccttcaaacctgaccgtccgcagccggcgccttcctcctcatcatgatcctcctcctctgcttccgccggcgcaaggttcaccgagccaacttggtctacgcgtgcgtttccccgaatctctgcttcgctcctctgtctttcttcgtctgctttggggtcgagctttgatcgctcgagggtcgggtgtggccggggggctctcaagcgggccgggagtgcgcacgacctgctggggctgcgtgctggcaatagctctcaactcgccggctggcgggctggcgcggacgggtcgcgtcggaaggcaagggggggttcgtcccgccggcggccccttcacaggctcgtctctgtcctgtgctcgcgcctttgctcgcgaagcagcagtggcgggcaacgcggctcccctcctcttcttgaccctgcgtccgtccggtccggatccccaacgggcgagagtaagggagggagatacgtcccgaagtgggtcggggatgctgcgggctcttggccttcgggctggtgatgcgacgccgatccgtggtcaggcgttggcgatctctttcggaaaggacgtcgaggaagacgagccggaggggacgccctgccctgatctgaaaaaacacttgctcgctcgctcggccctctcgatcatcaatcaactaaccccttccccccttaccttcctctcccgcctactgcctaacagccaacagcagcaagccgaaatgggccagaacaactaccagccccagcaccaaaatggcctccaaggcgctttcttcccgacctaccaaaacccccagcagcaatcctccggcccgggcatgttcaacaagttttcgaggaacgaggaggacgtgaggccgccgccgccggcttataatccgcagcagcagtcgggacagggccagcagcagcagtatgcgccgccccagggggcgccgccggggcatgagaatggctcgtcggccgaggcgagggagtgggcgcagcatcaggagaacttgcgcgctcaacagcagggcggaggccggcagtagattcgcgcacttcgacccatcataccccccccccccccctttacgggcaggcaggcaggcaggcaggcaggcgaggagggcaggtcggctccatgaggacgaaagaggagcgggagggcgggtccatcagggatgcagggacgcaatcccccgccgtccgactgccctccgcctgacaccgatccaaacacaagaggaggagggagggagggagtgagggaaacgcacgatcgggctcgaatcgaaggacccaaggaagagcgagacggcgaggtggcccgacgtctggcggagggcgagcggaagggcgcttgcgtcctgcacgcgggcgcgggcgcgttgcaggaggaggaggaagaagggtcagcgatggcgtttgggcgcgggtcaagcgggtagaccgcgcgcgcgccgcttgggctgaaagacgacagctcggaagagtcgggacggacaagcgtgaactttgcctttccatttggccggacgacgaggggcaggacgacgtccttgcccgactcgacgctgtgtgcagaatgagcagcggccgtcagcagtcgcatacatgcctccaagctccggcccagcgcgcgcgcgcggacggagagacacactcgacaaagctgacagccgcctgatgcggcgcggtgccctttcctccgtctcgctcaaagatgtcaaacgcgagcttgaggcttgtgcgcttgtcgagggcgagcggctccgggagcgagtcagggtaggtgagggtggtctgaaggccgtctgatcgggtgagggcgagcggggagagggcgagggctctggctgtggtcgctgctgctgcgagggcggcaacgaggcggaaggggcggaccattgtgacgtgtgaggggagggagagagaaggggagagatggtccgggctgagtaagggggtgagggttgttacgcagggtgttacgctggttacaccagggccgcgcaggtgccacccaccagccagctccgccctccgaccttcgcgctgccctccctcggaccttcgctaccttctttcgtcttacgatgcgccgctcgctcccccgcacacgcctgccgccggcctcgctcctgctcgccgcccggcccaccacgccctcttcgtccttgatccacctccgcctcgccctctcttctcgccgcgccttctcctgctcctcccaacggcatgaaggcggccaagaagccccccgctcgcccttccgcgtctttgttgagacgctcaagctcgagattgaaaagaaccgggacctccaggagaatgtcaagcagcttcagggcgacgtcggcaagcttcaagactccgagtcgatgcggaaagccaaggagctctatgaacgcgcgaggatcacgagcatcctgagggagaacccgaggttgagggaggcggccgacgagatgaagcggtcgggcgtcaaggtgagcgacgctgtgggagaggccctcaggcaggtcgaggaatccgagtttctccgtgcggtgagtttccttcctctttcttctttcgccccctccttctgctcgccccccgatcggccgtcgtacagcggtcgtgcgcgggcgagcttgaagaagtccccccctccctcttgcttgcgtcccttcccgagctgaaccgtctcccttccgcgcccggtccgcccgccctctccagctcaagaagtcgcgtgacgccgtctcctctgcggcttcgaccgcgacggcccctgtgcgcaacacggccgcctacaaggcgctcgccgagtccgtctcggaggtgtttgacgactcggccgcgagccgctatggcggctacgtcgagaaggaggtcaggcgcaagaagcggcaggcgaggctcgagaagctcgggaggaacgggatgggcgttgggtcgagggtcaaggcaaatgacgagttgggtccctctctccctcttcctcttgcatccctttactgtccgctcgagctagagcgctgacgctctctgtctctctctctctgtctccgctgtcgtctcgctgcttgcgcagggccggctccgccctcgttgcgaccaacgaggccgtccgcgagccctccgcctgggagaagatcaagaccaactcgcccgtctttgcctacctccaagacctcaaggagcgctacgacgagtccgagtcgcccgtgattggcgccatgcgggccgtcacctcgcgcatcggcgggctcgccgacgaaaacgagtttgcccaggtgacgcggatgatgcgcgctttggacccgggcttcgacgtcgagggcttcacgggcgatctgagggagtacatcattccggagctgctggacgcctatctcggggccgacaaggaggccctcaagcagtggtgtggcgaggcggttagtctcctcgggcgctctccgctggcgtctcctccccccccctccgccttcccaccctcgaggctgacactcgcttcttcctccctcgctcgacacgcgcccaacagtcgtacagcatgctctgggcgacgatggagcagtaccgcaagcaaggcctgatctccgactcaaaggtcgttaacattgtcaacgtcgacgtccgttccgccgccttccctcccctcctccctctcgtccctctccgctgacacacacacacacacacccttccgcgcgtgcgtgcgtacgtgtacggcaggtctcgaccggcaagatcctcgacaaccacatccccgtctacctcgtctcgttccagacgcaagagatcgtcctcttccggcatgcaaagacgggcgagccgctcgtcggccggccagacgcagtcgagacggtcaactacgcgggcgtctttgcgaggatcgaggaggagctcgacgacgaggtgacgggcggatggaagctgatggaggtgcgcgttttcgctccccccctcgctctctctctctctcgtttcttccgaaacgtccgctgctcgagccgtctcgctgaccactctcttgctttctttgccctcgttgcgtcgccgtccggacagatggcccgtcggggagcgacgctttagtacaccccctctctctcgctctcccccccgcctcccttcctcctcgcctcgcaggtgatcaacaacgcctgcggctcgctcgcgatcctcaacacagtcttcaacctcccctcctcctcctcctcctcgtcgctcagcgaaggcagcgggtggtcgctcgggcccgagcttgagaacctgcgcgagttcggtcaggggatggacgcccagagcttggggtatgcgattggaaactcggacaaggtgcgtgtccggtgctcgccgccctccttctgctcagtacggataagctgacgtcctcctcctccggtcggcgcgagcaagatccggaccgtccacaactcgtttgcccgggcagacccgttcgcccacgacccttcgatccaggcaaccgagaaggaggacgccttccatttcgtcgcttacctgccgtcgcacggccagctctacgagctcgacggtctccaaccccatcctctctcgcatggaccgatcccctcccccgacgccgaggacgccgccgacccgaagaaggcgtcgtcgtggctcgccaaagccagagaggtcgtccaggcccgaatcgcctcttacccaaccgacgcactccacttttcgctcctcgcagtgacagccgacccgctccctgccctcgagcgcacgctgcacgaggcgaaggaggcgggcgaggagatgcgggcggccgaggcgctaggcagggtcgaggatgaggtgcagaagcgcaagcggtgggctttcgagaattctgtccgtcctcacacccgtcctcccaactcgcttccctcgtcgctaacgacgattccccccccccccgctgacatcgacatttgctcctgctcgctcgcttcactcgcgcccctccagctccggcgacacaaccacatctcgctcgcgcacgcgctcctcgtcgcgctcgcgaaggccggcaagctcgccggcgccgtcagcgccgctgaggagaagggcaaggtgcgccgggcgaaggaggctgagcggagggcgaaggccggaggcagtggggatgcgatggatgagtagaggcccctttcgtggtcatccttgagaccgtcttagctgagctgcgaaaggcatgggatgaggggggcaaaccgagaacgtcgtgtgtcatgtatgtgtgtgagagaggcgagccaaagagtgtcaagagcgaaagggaaaaaaagggagagggacgggggctaagggcgcaacggccggaggtagcctgacgggacgagcccctcggtctctgacttgctcctgccgtcgagcggctcgccctcggacgagaggagcgtcgcgaccgcccagccgacgccgccgctccggtggacacggacgaggtcgccctctttcagcgagagctccgaatcggcctcagcttggaagctgatagggggcgggggcggaagcgcagaaggaggagtcagcggcgatcatgcgagagcgacggaagagggcgcgcgggaacgcacgcatagagggcttcgtatttgcctggctcaatcgggtcgggctcgacgtcgccgtgcggatgctcgtgctggtgttgctgcccgccgtgctcgccgccgtcgtcgtcgtcgtcacgccactcgctcccgtcgtcgtcgtcgtcgtcgtcctcctcgtcgtcgccaccgcggtcgccgccagcgtcggccttccagccgccgaagccccacgacgtgcctgagcccaatgtctgcgccgctgccggcgtctgtgcctcgtcgccgtcattcgagtagtagagctccgctctgagcgggcccttgcccgcgaagcgctcgtcctcgcgcccaaaggcaaagtcacggacgacgacctctggcagcgccggtcgtttccccgacgggttcgcgcgttccctcgcctcgcgctcggccttgtccgacgtctgcttccggtgcttctcgtcctgctcggccacatagtcgcggtcgcgctgctcaatcgtctcgtgcatctgttggacgcgctcctggctcggccgcgagcggtcgcccggcaacggccggtcgtcctcgtccgggtcgtgcggctggggatacatgatggtccctggatgcgtcttggagtgggtcgaggccgagccgaggacgtgcggccggccttcgggcacggcgtccgacgtgccctggataccttgcgagtgtgagtggtggtgatggtggtggtgatgatggtggcgctgctgctgttgcgcttgcgtctgctgctgctgccggtcccgctgctgctgctgctggtgctgagtcgtttgcgaggtccgtcgcgagccggcgtggtccgacgattggcgcgagccgccagccgactgccggctcggaaagctcttcgctgtcgcccgcgcaaacgccgtctcgtcgtccgagggcgagtgcggactcgaggcctggacgccgctcgagacggcactcccgccagacctcgaggacgacgacgctggcggtgagtaagggtcgcctcggtctctgctgctgccgccagtcgcctgagccggctcgtccgtcgccgacggtgagttgatgacgagcgcactcattgcgtcagtcgactggtctgcctgggcgagacctagcgcgccgccactgccactcgctaccggctgtcggccgtcgtcgtcgtcgtcgtcattagccaagaaggtcgagccggcgccgtcgtcgcgctcgctgctcgtggccgccgctgccggtgtccgcttcgcactgtcggcgtgaccggcaatgtcgagtgcctttatgcgctccatctcctcctcttgtgacggcggtgggacaaaggtcgagctcggcgaggggaagccgggcgaggacgacctgttgggatggctggtgcgaaggctgctcgcgctctgctgatgctgctgctgatgctggtcttgcgagctgccagaggcgctggcggccgcttcttcccgagcggaatctgaagcagagaaggtcgagggtcagctcgtgcgagatagctggaaggtactgccggcctgctcgtcctagagggccgggacatagcaggacaagcgggtgctcactcgtccgctctctcccacctctcgcagaggagcgcgttaagggcgtgatgaacgacatcgagaaggcgcaggaggccggcgagtcgatcatcctctttgtcgatgagctccatctgattatggcaggcaagggcgacagtggaatggacgctgccaacctgtaggtccctctcggttgtcccagcaacgagaccatttgctggctttccactatcgcacagacgagactgaccgtgccacctttcgcacctctttcaccgcaggctcaagccgctcctcgcccgcggcaagctccgttgcatcggcgcaacgacgctcaacgagtaccgggagcacattgagaaggactcgggtacgtaggaggcatcaatcctgctgggcatacgccgctcgatgatagctgatgaggctgcacccttctgccagcattcgagcgccgcttcgcgcaagtgatcgtcaatgagccctcggtgccggccaccgtcgtacgtcttgtgcaactcctgctctactctacctcttggaatttgacgtcttacaccttcttcttcctccgtcccgcaggccatcctccgtggcatctcggaaaagtactcggtccatcacggcgtccgcatcctcgacggcgccctcgtcctcgccgcccagctcgccaagcagtacctcactcagcgccggctgcccgacagcgcgatcgacctgatcgacgaggcagcgtcgagcgtcaagattgcgcgcgagactcggcccgaggcgctcgacaacctcgagcgcaagaagctcgaggtcgggatcgagatccatgcgctcgagcgcgagaaggactcggtctcgcgcgagcggctcgaggtcgccaagaagacgctccaggacatcgaggaccagctgacgccgatgcgggcccaatacgaggccgagaagtcgcgcggcaacgaaatcaacgatgtccggcagaagattgatacgctgaagtccaaagtgatcgacgccgagcgtcggcaggacctcgagacggccgccgacctcaagttctacgcgattcctgatcttcaaaagcgtctcgagcagctcgaagcccgcaaggccgagaaggagcaggcgggcgagtttgctgagaccaacatcgtcaccgagaccgacattgccgaggtcgtcgcccgctggacggcgatcccgactggccggctgatgtccacggagaagcaaaagctgctccagatggagaagattctctcgcgctcgctcgtcggccagcccgaggccgtcaaggccgtctcgaacgctgtccgcctcaaccggtcgggcctcggcgagaagaaccggccgatcgcgtcgttcctcctctgcggaccgtccggcacgggcaagacgctccttgccaagacgctcgccgagaccatgttcaactcggtgcgttctgcctgtccatcttccgctgtcgcatacgtactggcactgatgctgctcccgttcctcaccttcgcagcgcgacgccatggtccgcatcgactcgagcgaatattctgaaaagcacagcattgcacgcctaattggcgctccgcccggctacgtcggtttcgagtctggcggccagctgaccgagctcgtccgccgcaagccctacacgctcgtgcgtccgacgtccgctgattctcggtttgagtgcgagcgctgactgggctgcatcttcttcccctcgcagattctcgtcgacgagatcgagaaggcctgccgcgagtttgtcaccgtcttcctccaggtgctcgatgagggtcatctcaccgacggcaagggcgtgagtcggaacgcgcattcgtcctcgaccgactcgagaggcaaaagactgactcaatcccttcccccttccagcgtaaggtcgacttcaagaacacgatcatcctctttacgtccaacctcggtgccgcctacctgaacgaggtcggcgacgggcccgtcaagcccgagacgcgcgagctcgtcaccggcgccgtccaggcccatttccctcccgaattcatgtacgtcctcccgagtctcaccggcgccgcgcttggcctccagactgacgctttgactccctctcccgcagcaaccgactcgacgagacgatcatcttccgcgccctctcgcggtccgacatggccaaggttgtcgacatccggctccgcgaggtcgagcagcggctcaagtcgacaaagcagatccggatcgaggtcgacgaccccgcacgcgagtggctcgcctcggccggcttctcgccgcagtatggtgcccggccgcttaaccgggtcatccagcgagagatcctcttccctctctcgcgcatggtcctcgacggctcggtccgcgagcgcgagacggccaaaatcacggccgactttgccgctaaccggattgtcatcgcccagaatcatcagccagaggtcgagatgatggacacagacgattcggacgacggtttcgatgaggacgacgacgacctcaaggtcgagcccctcgactaagggccgtccactgtttctctgcgctcccgttctcgcccctgatctcaacgccttcacgccccttaatgtcccttcccgtttcgccctctgcgcttgtgcgcctcctctcccctcctgtagccgacatcttgcgatcgatcgaacgttcttcttgctttgctcttcgtctcgtcgtcgtctcaccagcgcgatcagtgagagaggtgggttggtgcagagtgggttgaccgaagtggccgccagccgttttccaaagtcctttgcacgacaagctctcaatgcgtacgttccgcgacagtcattcagtcctctcatagctcgacgttgaggtccttggcgatcatccggcgggcgatcgggtctggaagcaaaggaaggtcggctatcgagtcagcggggggcgcaaaacaggccaaggacagcacgaggcacgcacggtaaaagctcgcgtgagcgaggaacgtcttcttggcgagctcggcgtcgacagcgttcagagagcgatagggtctggcccggctcgagaagatcctctcgctcgagttcccgcagtataacgacgcccattcgcttgccgacttcccgctcccgcaggtcgtcgcagaaatgctggcgctggcgggggcaggaaggggcggagcggggaggggagacgggaggaggagaggaggaagcgaggaggaggaggaggatgacgagatgcgcgaggaggataaggaccgggggaggggaaggctgacaaaggggaagtggtttggcgtcgtgcgttcccgccccttttcaggtctcgaggacgaacgcctggctgaccttgagctgctgttactgtgcggccgagcagagtgccgttcagtctatgtcggaggcgcccctcctcggcaaggtccgtcctcacgtctcctcttgccctgcccctcatcccctgcgtccatgactgaagggccctttccgccctcccctccggtctgatagctccagcctgaggcgtcgacgatggaccttctccaggccgagcacgccgcgatcgagctccagctcgaagacactgcgacgcctggtccgtccctctccccctcctcctcccctttcacccttccctaacgcccctcctcccgtccagccgaaaacctccagcggctcatcaccgaatgcggcgtctcgccgacaaaggtcgccgagctcgtccaggagctaccgccaaaggactttgcaaacatcctcgtcgactggttcttcgcgaagatcaacagctcgcgctatccaatccacgagggcatgtttcgcggtaaggcctagcatgttgcggagccatctgccgagccccgtcctcggctgaaaggctgacgagccttcgttctcgcttcgcttcagccgcgtacgagtcgctctatgcgaacgggctcaagacggacccgtccaacgtccgctcgctcccgctcgtcttcatcgtcctcgcgaccgtccgtcctcccttcccataccttcgtcccgcccactcgcaaccagctgacgcttgacgcccgccccgccgcaggccgtccggctctcgccagagcatatcggcggcgacgaccggacgcgccggctgacgtcgctccgctactactggtcgagccggcggagcatcctcattgcgacggcgattcagagcgagagcctcgagctcgtcattacgcggctgctcgttagtccctccctgctcgcaaatcggccttcccagccctgcgagacccaagctgacaagcgtccattgttgctctcgctctccagagctcgcgctacctcattatggtgcacgaccggcgcctgaccgaatgctggtcccagctcggggcctcgcttcggacggcccaggcgatcggcctccaccgggacggcactaagctcggcctcgacgcattccagaccgagtaccggcggcgcatctggtcgtacctttaccatgcggaccggacgtactcgctcatccttggtaggccgccggccatctcggacgtctacaccgacacgctgtgcgtccccctcgtcgctcgcttccaccctgttgcaggaggccgttcactgacccttccccccccccgacccttctgttccctcccaactacccctggtcgtctggcaggccgccgtcgaaccttgaggacgccgacctcgtcccaggcgtcgcgcccgacccccggccgctcaacgagccgaccgccatgacctactgcgtcctgcgccactcgctctcgcgcatcatcggcaaagtcacccaccacttccagcagctgctcgagccgtcccactactctgacgtcctgcgcctcgacgacgagctcagcgcgtttgtccgcagtctgccgcctcactttgcgatggagaacccggacaagacgctcgacaacatgctcgtcagctttctgccgatgcaccgcttttacctccacaccgagattctctttgtccgcatcacgctccacgttggtcccctcttcactcgtctcagcgcgagctcccctgagctgaactcccttctccctcggcagcgcccctggctcctccgcaagctcaagtcggataagtttctcgtctcgcgcaacgcctgcttcgagtcggccaagcgcgatttcgtcattcgccaggcgatgaagaagacgtcgacggtcgacatcatctcggtcatgggcggccagttccgcgagttcaatgctgccagttgcgtcgctcctcccttactctgcactgtcgtgaatatcgcctggctgacgcgcctgccgcctcgtgaaagtgatcgccggcatctcggccattgtcgacccggagggccccgagggcgagacgatgcgcggcatcctcgcgacctttctccaggaccacccgccggcgagcgcgatcgacgacacgaccaaaaaagagcggagcattgtccgtcgcctccatcccccctcgcatcgctgcctctccacttgctgacctcttggcttcgtcgacggttggtagatcgagacgctctaccaacgttctgttcagctcctccgcaaggacccagcgattggcctcaacccggccctccaccagcttcacgacgaggccgcacacgcacggacgctgctcggcctctcgaacgcgtcgtcggcggcaccgacgcgccaaacgagcctccactcgcagccttcgccgaggaagcatgcgattggacttccggcggtggccggcggcagccggggaggagggggagggccatacggtgccggcggcccgtcgaaccaagacgcctacgctcacggctcgccctcctcccccgccccagccgccgccgtcgcctcgtggatgtcttcgacccgcgcgtccgagacgcccccctcgatggaggacgactcggcccagcacctgctcgaccacttctggaacgaaaacctcgtgctcgacacggtcgtcggcaaccaggatcagatctatccgtcaaacgtccagagcgcggcgagcgcgtcgctttggtcgagtgcgggcgggccggaggcgcttggcccgggcagtgctgggcgctttgagaagcgctcccaggaggttgggaggcggagaggggaggaagggcaagcggcggtggagggagaggcaggagcggttggcggcggagggctggaagacgaggaggaggaggaaggaggtggaagactcgtctgtcgtggacgggggatgagagacggcgtcgtcgtaggcgtcgactgggccgtctgcgcccagagaacagcagcagcagcagcagcaccggctgccgccgccgctccatccgcgggcgacttgtcgattgctcctgacgacgcagcccgagaggaggccgaggtcgactgcgccgccgccgctgcggccgggaggtcgaccgagcctgaagctgaccgtcggtcagccgcctcttcctcctcctcctcctccgagccggcttcccgcgcgcttggaccagggcgcggagacgagggcgatgccgatgccgacgtcgaggaaggagggggcggcgaggagagcgatggtgcgtgtgcggctttgggcggcggagaacgctggctgggaggcgggccgagggcgggcgccgcgggtggtggagcaggcgggggcatgatctgcctgttgaacggcgggacgaggggcgaggaggacgtagataaagtttcaagccggtcagcaccgatcaaagcgcgaaggagaggaggtcagaagtagaacgcacatgagcagctcgaccatctccccctcggccaacctcagcgcccgcccctccccatcagccccgccggcagaagacgcctcggcgaacgcctcgagcgcggcgagctcgtcgggcgcgaggaggacgatgtttgtctcgcactcgagcgagcggatcactgtgggcgggcgcgggcgagaggtgtgcggaggaaagcgcgtcagcgagaggcctgccggagggacgacaaagggagccgggccggcggtcgccgctctccttcccagctcgctctgctcgtgcacgctcggaaggagagaggagggtgagtacgcacgttgaggcaggcgtgagacgggcaggtcggccgtctctgggccgaacatccctcggacgcgggctcggaggacgtcttgcgaggagagaggggagaggggggaggagcgagcgagcgagcgagggtcaggtccggttgcgagtgcgggcgggtgagcagaccgagcgcgaggcaaggcaggatgtgtaggaggttacggacctgtcgatggcctggttgctgtgctactagccatcgtgccttgaagaagagggctgtatgcggttgttgatggagaggacgaggaggcgagcgaaggcgacgcgcgcgcagtccacccctcggcgcgcgcggtaaccctaactcaccctgcacgagatcgtccccctccgcctgctcctcctcctcctcctccaacctatccctgctctcggtacgatggccgcatccatctcgacgaccctccccttcccccagctcgtcaccattgtactcaaggcgctcacgaccgaagatggcccgacgctcgctttgtgccttgcgagcccattgagcgccaacacgcccgagcagcagcagctgccgagggccgtcctcggtgcgctcacaaactcgagcgtgaggcctcccgccccttactcttgctagcatcacctggctgctgttgctgctagctccggacctgactccacctaccatccgcgccgcaggaacgcttcctcctcccgctcgcctcccgcctgcccgagccctggcgggccgtcctcgtcggccacgtccaggtgctcgtctacgttcagcaaggcgcgttcgccccggccgggtcggcggccgagctcgaaagctgggagggcgcgtgcgttcctctccctcccttggacacggacaggctcgcccgctggctgcggcggcggctgcggcggcgcggacgggcgggctgtttcctcttgaagggcttgacgctgaccctgcgacgggcgacgggctcaccccgctcttgctcctggcaggtacaaggcccagaacgcgcttgtctcgtacgtcctcccttccatcctcccataggctgcacgcgcccgggccacctcgctctgccccttccaaagttgagtgcgccgtcccgaaaccctcaacctgacccctttcgttccgcccgcagagcctaccttacaaagcacctctccacctcaacatcctggtccctccccgtcctccacacgctcctccgcacgctccgccaactcgcgacaaagaccgacggactgtcgatcctcgcctcgcgcttaccttccttctcgtcaagcagcgccgcgccgagtgggagcgggagcggctgggtgcgctccgaagccgtcgcaagactgacgatgaaggcctttactatctgcgcgaccgaccggtcctccatcccactctcacccggcgcccgccaatggggcatctacgcgctcgccaaccagctcatcaagtcctactttgcgctcggccggccgtcactctctgccaacctgatccgcgcagtcgacaacgccccgggcaagcctcctctgacggcgtatccgaaggccgatcaggtgacatgggcgttcctgatggggacgctggcgctgctcgatgggcgctgggcgcgagcgcgcggagagctcgagaaggcctggacgctctgtcacgcccacgcagtcgttcaacagcggcagatcttgacggtgctcatcccgctcgagctggtcgtcaacgggcggttgccctctgcagcgctcctcgcggcccacccagcgctagagaggctctacgcgcccttccttctcgccctccgccaatcggacgtaggcgcgtacgacggcgctttggcggcgtcgctcagctgggccgtcgacaagcgcgtctttgcggcgctcgagcgcgcgagggaggttgtcctccggggcgcgctgaggaagacgtgggttgcgctcggccggccgagcagggtcggcgtaggggagtttcgggcggggctggccgtcctcggaggggcagggcggacgcagtcggagggagcggaagaggatgaggaggagggaggaggaggagaaggacggcaagaggagggtggcgagggagaggaggcgggaaagcgatacagagaggagcggcgagggtcaaggaagaggcaagcgagagggaaggcgggcgaagaaggaacaggccaaggccgagcgtcgcgagagacgagggcaagggtgtcgagtgaccgaagaccgtgaaggacgagcagcgagcgagagagagagcagccgcagtcagccccagccaacccacccatcagcccagccatccgcacaggcacacgcaccatgttcgccccgcatacgatccccaactcgtccatcccaacgccctcgccctctcgccacttaccctcgccatcatacaccctcctccactcgtccgccagagcctccctcagcgccctttcgccgaggatcggcccgtagcgcgcgccctctggctcgtcgagcacaactcttgcgagctcttttgtgaactcgggaggcggaggggctgaggggacgccttgggagaggtcgagaagcggctcctgaggagacaaggcgaggtaggttgccttccaagcctgggcgagaggaatcggcggcggagcagtcgagaggaccgcggggttcaagcgcatggctcctgttgctgctgtgactgctgctcgctcgcttgcggctgctgctgctgctgctgtggctgtcgctgctgccgtagttggttgtcgacggcccatctcgcacccgcgctttgtcagcctaagtctggttcccacggccaactgcgcacgcacccacgctggaagtctcggcccggccagcacatcgtccctccccgttgcgtctcgcccctgctcggtcagccccttcttccctcttcttcatctcttcctgagaccaagcatacacccgtcttccagcagcagcagcagacgcctagagctaaagccctcgcacggcacggagaatacgtcatcgcctctctccctcaagtcccgccactcgcccgccagcccagcagcctccgatccttgaggcgatgcgtctcgccttcgccctcccgcttcttctctttggcccggctggcgcgctctccagctctgggcctgcttctcttggtggtggtggaacggtgctcgaccggccgctcgcaccgcacgcttcgtcgtcgtcgtcgtcatcattcggctcaagctcaagctcgaccgacggcggcgagtctggcgaacccaacctccctcccgccgtcgtcgtcgtcgctcctctcgcggacgacccgcaccagcagcagcaatacgaccagcatcaccagcatcaccaacagcagcagcagcagcagcaccgtacaggaagcaagcgcgcaaagaacgtcctcacatcgcgccgccgcgcgcctcacgccggagcaggcgcaggagcagcgggagcgggaggcgtcgagggcgctagcgttggcgctgagaaggtcgtcggcggcggtaaggcgagcaggatcgggacagggcgcaaggatgagggtgagggggccgagggggtcggtgaaggagagggaggaggagaagagaggggagggtactgctcggtccgttccctcttctttctttcttccccctctcttcttctctctcgaactctatcatctcagacggctgcttgatccctgttcggatgggcttcgggcggtcggcgagttcgggaaaatccggcctgcgcatgcatgcacgcgcgcacgcacgcacgcgacagcgctgtgcagaggtcggacggcgagacgtccgcctccgcccaagcttgttgcgcttccaatcgccgcaacttcggcgtcatccaccttcctcgccctctctctctcggtccgagagctgacccccccccccccactctgtacacacacacatagccatcaggccccatagcccacaccctctgctcctacgagcacctcgagcgctcaaacgccgacggcggactctacgacgcgctccatcggctcgtcaattaccccttcttcaggctctacaaggtccgtttcgtccccgtccctccgctttcttcgctggtgactcgcgcgaaaagagagcgcggaaatgtcggtcgagctcagcttcgttttcgagccccttcgagggtttctcgcgagagagctctcgaacgagagctttctcacctccgcctgctctcgcgcgcttcctctggcgctccgccagaagggcccctcgcagcccagtagcccccttacgccgtcagtcgcctgggcagctcgagttctgccgtcgtcatcgtccgttcgagctccacacgtcaacgcgcgcaaacgcacagactctcgtcacgctcgctcgccgggttcgtctggcgagcaggcggggcagggtgggtgcttcttccttcgcgcagcaggcaggcagggaggcggggtcgacgagcgcgttctttctaaccctcgtcgagactcgccctcgctttgccggagcgcgccggagctcgccgcgggccacctaccgccggacggacgtccgtccgtccgtcgatcggccggccgcgagtcgacgcaagacccaagaacgggccgtcgccgcttccgagcctagctgctagcgagcagggcgaggtcgatagccaggcgcgcgtttcgctcgcaagagatgtgtgtgcaaggagctccacccgactctcgtaggagacggttttcccaccgcacatatccctgcgctcgctgtgcgcggcggaagggaggagggcggggagacggaacggagcagatcccacgttcctgccgagcgggtcggggggcgggcaggcaggcgtcggagggtctcactcgcctcttcctagcgtcgtggagaggccggtccgagcggagcacgtctttttaggacttggacgttcgcttgcgatgcggtcggtcgtctgcagggccagaagggggcaggagcagcgcaaagaacgcgcgacacaccaacccagaccggcaacccctcgttcgaaccccattgctgaatccttcaaccccccccaccctaccccggttgcaggatctacatcgtcatggactttatcgagcacgaccttaagacgctcctctcgctcatgccccaacccttcctccaatctgaggtcaagacgctcctccaccagctcctttcggcgacgcaccactgccatgcaaactggatcctccaccgcgacctcaagacatcgaacctgctgatgaacaaccggggccagatcaaggtggccgattttgggctcgcgaggaaatttggcgagccgctcggcgagatgacgcagcttgtcgtcacgctctggtaccggtccgttgtcctctgccttcatcacctccctcgcgacttctccctctcgcatatgtgtcacgcaacctgacgccgcccgcaccctctatctcagctcgcccgagcttctgctaggcgagaccgactactcgactgcggtcgacgtctggtcgatcggctgcatctttgccgagctcatgacgcgcgagcccctcttccagggcaagggcgagattgaccagattggccaggtacgtgccggccctccctcgaaacggggcacacacacgacctggtcgatgttttttccttgctgatggggcttgctttgcgttgaccggcccgcgcggcagatcttccggcttctgggggcgccgaatgaaggaaactggccgggctggaagcggctcccgctcgccaaatcgctcaatatcgccagccagccgtacgtaaacgcccgcacaactccaggcgctgctttctcatgctctctaccttgcctggatgctgaactggcctgcctgcccgcgttgctctgctgatggatcagacgctattcgagcctccgccagcgcttcaagtacgtgaccgaggcgggcgtcggcctcctcggcgagctgctcgcgtacgacccggccgggcgcatctcgtgcgaggacgcgatgcgccatccgtacttcaggtgcgagctctctctctctccgtcgcttgtgttgggggtcgggagctgatttctccccctcttcggtctggctagtgaggcgcccttgccaaagcacccttcgctcttttcctcgttcccctccatcgcagccggcgaaaagtgcgtcgactcatcctccctcgccgtgcaagcgaacacaacgggccgaaactgacgagctcctctctcctcccctctcgcgacctcgactcgcgcggcgcgcaaagcaggcggcgaaaggccaactcgccctctgcgccgcatccgacgtttggctttgatcctgatcaatgagagcgaccaccagactagaacgtcctgcagaaactgtgtaaagagaaggggatggtggatgtggctcggggtgattcgtacggtcgctcgccctttcggccccggcttggcgacgacgacggcggcggcggcggggccgcagcgaccccctcgactcgcaacgctccgaccataacctcccccgtttcctccttctcctccctatgtcgtccgccctctcgattgcccaggccgcccgggccgcttttgacgcctcgcagctgatccccgccgaggagcgcgacggcgcgctcgtcgccatccggcgggcgctcgaggcgaaccaggccgagatcctcgccgccaaccagaaggacctcgacgtgcgtttcctccctgcctccctcctcctgctgaaggagctggacccctcaggccttcccagctgagagctcgtatttcttgccccttctcgcgaggaatgcacaggctgctgctccgctcgtcgagtcgggcaagctctcgtctgccctatttgcccgcctctcgctccagtcggccgccaagttcgatgccctcctgaccggcatcaacgacgtcgtcgccttgccctgcccaaccgaccttctcacgtacgcccgcgaactctcacccgagctcgccctttaccgcgtgacgtgcccgattggcgtcctgctcgtcatctttgaggcccggccagaggtcgtcgtcaatatcgccgccctcgccatcaagtctggcaacgcggcgatccttaagccgggcaaagagacgacccacacctcggctctcctctcgcagctcatccagcgcgcgctcgcctcgacgcgcttcccaaaggaatttgtccagacggtcgagtcgcgcgaggacgtcaaggcactgctcgaccaggaccgcttcatcgacctcgtcatgccccgcggtggtaaggagctcgtccggggcatcaaggcgagcacaaagatccccgtcatgggccatgcggatggcgtttgccatgcgttcctcgacgagagcgcgcgcgaagagacggccaggcgggtcgtcgttgatgcgaaggtgcgaccctctttctctggttggaagtttggctcggatgtgctgcggagggaggcgagtccacgctgacccactacccctcctcctcgtcgtcctccccggcagaccgactacatggcggcctgcaacgcgctcgagacgctcatcgtccactcgtcactcctcacgaccgtctggcccgccgtcgcttcggctctcctcgccaaatccatcaagctccacgccgacgcccggtcgctcggcgccgtcccctcgcacgagctcatcgtcccttcgacgtcctcgacgtactttaccgagcaccttgggccggagctctcggtcctcacggtcgactcgctcgccgaggccatcaagcacatcaacgatcactcgtcaaagcataccgacacgatcgtcacccaagacgaggacagcatgacagccttcagccgcggcgtcgactcggccggcgtctttgtcaatgcgagcacgcgctttgcagatggcttcagatacggctttggaactgaggtcggcatctcgaccggcaagacgcacgcccgtgggccggtcgggctcgaggggctctgcatgtcggttcacccgcctttgctttcctcgcacggattgccttgcgcggcgaaggctgctgaccccctcccctcctgcgctgctgacccggggtggaggaggtgggggtggggttacttgagcgagacggccttgatgccgcccttgccgtcggcaatcttctgctcggcgcgcaggggaagaagaagagggtcgtcagctttgcgcaagtcaaagggcaagacgcaggcgggacggacgaggatttccgaaacgagtcccgtcccgatcgtctttccgccctcacggagcgagaagcgcgagccaagttccatcggcgtgtcgtggacgaggtcgcagatcatctcgacgttgtcgcccggcatgaccatcttgttggccgcgtcggcctcctccggcgggaacgtcagctggcaagtcacgtcggccgtccggaagtacatctgaggcgagtacttctggacgaagggcgtgtagcgaccgccttcctccttggtcagaatctgcaaaaaagcgacgtggacgaggtcagcgaccggcaagcaggcgggcgagctcgatggggggaagggaccgacgtagatggacgccttgaactgcttgacagagtcgatcgagttagggatcgtaatgacctgcccgcgctggacctgctcgcgcttgatgccccggaggaggcagcccatgttgtcgccggcctctccctacgcggaacgagaagcaaagcggccaccaagagggtcgtcagcaaaaacgagcgggcaaataacgattgcaagccagcgacggccaagcaagcgagaagggcggcggcacgcacccggtcaagctccttgtggaacatctcgatgccagtaagcgtcgtctttgtccgcatgccctggccgacaatctcaatctcagcgcccttgaggatcgtcccccgctcgacacggccggtgacgacagtgccgcggccggggatcgaaaagacgtctggcggaagcaatagatggggaggggggaggggacacgtagcgggtgagaggggtaagagcgagggggtcagtcgtttgaggaaggaggggagcccgcgcgccagaacccaccctcgaccggaaggaggaacggcttgtcgaggtcgcgctcgggcgcgtcaagccacgtgtcgcacgcattcatcagctcctcaatcttgtctgcgccaatgtgcttgtcgcggccctcgagcgcggccagtcccgagccggtgatgatgggcgtgttctcgccgtcgtagccgtattgagtgaggaggtcgcgcatctccatgtcgacgagctcgagcatctccgggtcgtcgacctggtcaaccttgttgacaaagacgacgagcttcttgagcccgacctgacgcgtcagcagcaggtgctcgcgcgtctgcggcatctggccgtccgtcgccgcaacgacgatgatggccgcatcgagctgggctgcgccggtaatcatgttcttgatgtagtcggcgtggccggggcagtcgatgtgggcatagtgccgcttgtccgtctcgtactcgacgtgcgcggtcgagatcgtgatgccgcgcgccttctcctcgggcgccttgtcaatctgcgagtagtcgacaaacttggtcgacccagacttttcggcgaggtgcttggtgatggccgccgtcagcgtcgtcttgccgtggtcgacgtgctgccagcggcaaggagggttggcatcagcgatagaggcccgatcggccgagagcaaaagaagggactgacgccgatcgtgccaatgttgaagtggggcttgtcgcgcgagaagacctcggcgtacgcccggcgcgagactggacgagccgggaagggaggggtagcgtcagtcacgagcaggcaagggcaaggtgcggccgatcgcgagcgtagacgaaagggacggaccggcagagacggccgggagggtcgcagcagccgcgccggcgcggagcgagcggagcgtctttgagctctggccaaaaacggtcgactgggcacgggccgagagggcgggccgggcgaccgagagggctgaagggagggagggagaggaggggcagcggtcagcggcggagttcgggaggcgagaggcagggcgagaggacaagggcaggccgagcgagggctgctgctgctgctgcacgtcgaccctcgtaagctctaggccgaggaacagagcagagctcgctcgcataagcagcgcttgtccggcccaagcccgccgtcgttgagctgcgccctcgtgcagagtaaaagtgggcgtcggagggtgtgcgaccaggcctgctcggcctgctctccctcccgtcccctctcgtgggtgcaaggactgaggactgactgcgactagcaaccgacgagcggccgacgagcgagcgtgtgctgctgatgagggcgcgggacgacatcggggtagaggacgagggtcgggtggcggtcgagggcgagtagaggaactcgtctaagtcgggccgagggggatagatgaattcccccgcgcgcgcttgtcaccctccatcggctcgccctccagcccgtcaaccgtcactcgcagccatgtcgtccgtccccttagacccatgcatacatgcttggatgcgcatcctaaagctgaccctttatccgatctctccactcgcagcgaatttctctcgaccccacgctccgaactctccgaagaccaggtccggcagctcgaagagtacgaggtctcgcaagggccgctctcggtccttcagcagtcggttcggaacaacacccaggtcctcatctcgctcaggaacaacaagaagctgctcggccgggtcaaggcgtttgatcggcatagcaacatggtgagcgcagcttgcttagggttgtccgggctgagttgagggcaaggcgctgatagcacccgcttcctccccttcgttccggacgccaggtcctcgagaacgtcaaggaggtgcgtccggcctatcctccagcgagaccgccgagcctgcttgcggccagcatcagcttgcccctcgactttgagagctgacccgcttcctccccccccccggacacctcgctctccgtcgtcgaccggtctcgtaacgctgtcaaggacgtcctctcggccgcagctcacgccaagacgctcaagtacgcccgccgggtgtctgctcccttccggccttttgtcctcagctctggcggtgcggtcgagtccggcggcctgaagctacttgacggctggcgcgagtccctcgctccttcgacctactcgcactttgtccgggtgctctcgtttatcctcatcaaggctcggtcgcgactggctcggctctagtgcgcctctctggcttccgctccgcggcgccgcccgccttcgtctgtttcgttttcccttctcctcattggctcctctctgttccgcctctcttccgctccgtctaccttcaccctccgcttccgtgtgcccgcttccttcttccgtagctagtcccaccgcctctctcttccccctttcaacgacccccttcttcgtccgctttccccttaggcagccaacccgaccctaccccgttcgtctctgtgcccgtcccgcctgtccttgaccctgccttacactattcgatgctgcagtaaccctacaccaggcaacccgacccgaccctaacctctcgggttcggagctcgtttgccacaggggtacggtcggacccatcggccaagcctcgccagccatggctaccaagcggggccgttgccctcgctgtcgcacagagttcgccgacctctgggatcatctggtcaaacgacacaaggacatcagctggtccgtcgccgacctccgaggaacgacccttctcgcctgcccttgcggcgccgtcgcccggtcggaccacggcctcaagtcacaccagggcaaggtccggtgtgttggtcttcatcaacgacacgccagcacccccgctccggcccgtcccgtgccccgtcgagctccgtcggtcgcccctgtcgtctccgtcgcatcccccccagctccgactcggactccagctctaccccgagctccatcaactccagtccgtcggtcatccatctccaacgctgctgccgccaatccggagttcgagctgctgttgtccgaggacgagctcacgccggtccgtcggcctcgtcggtcttctgctcctccaacgccagccgactggtccttcagctcgtggtccgagtccgaacgcggcgaccctgcttcagtcctcgcacccgctcctccgaccccggccgcctctcctccgacctccgagccctccgacgacgactcttcggcccctgtggacgaccttctcgaccggttcatgtccctagttcggctgccgacggccgtcaagcctctcatcggctcacaagctcggctctttgccgacgccgctgaacggctggcctcggtctttgtcgccaagccatcggacgagacgctgttcgacttcctctgcctgcccaaggttggcctcgtccctggccttcgagccgacgtcgacctcaagcagcggttggcagccttcccttccgtcgcctggcccgagacgccgtccaacgccgacaggggtgtccgtcctcccgacaccatctccgaggccgtcgccaagcaggttacttccggtcgtctctcccgggccgcccgtctgctgtctggttcggccaaggccgctcctctcacctcggacgtctcagccgagctcaagcgcaagcaccctgctggacccgctcgcccctttgctgccggcatcggcccgtctccaggcatggcgcccaaggcagacatcgtcgacgaggtcttccggaagttcaagctcgacacagcgcctggcatctcgggctggacgcagccgttgctctcggtcgctctccgtcggccggccgtggtctcgttcgtgtcggtattggccggtctcgtcgctcaaggcgccgcacccggccaccagcttctgtgcgcctctcggttgacgcctctcatcaagtccgatggcggcattcggccgatcgctgtcggcgagcttctgtttcggctggtggccaaggtccttcttcgacactacttcaagcccgacatgctccttcccaaccagctcggcgtcgggtccaagggaggcgtcgagccggttgtccgagcggtccagcgcgcgctcgacgatgagctgcccaagacctacactcacctcgtctcgctcgacttcaccaacgccttcaacaccgtcgaccgtcgcgaccttgccgcagggctgcgcgactttgctccggctctctaccgtgccggtcgatggatctacggctcgcccgctcagctcgccgtcaccggtgccgatggggcggtcgatgtactggagtcatcgcaaggggtccgacaaggcgacccgtttggcccgctcttcttctcggtcgccatccgtcggacgctggacgacctcgttcgacacctcggccctgaccgattactactggcctacttggacgacatctatgttctctcgtcggacgaccaggccttggccgaggttcaggacttcttcgacggtcgcggctcgtcccttcaactcaacgttgccaagtccaagtcgcactcgctggccgacatccgaggctcggggctcgagctgctcggtacggccgtcggcggtccagcattcaggcgatccttcctccaggccaaggtcgaccatcaagtcgagctgcttcggtcactcggcgacctcaagtctcagcatgcgttgctgctgcttcggttctgcatccagcaggatcttcggcacctccagcgcacgcttcggacggacgatctgcccggtgtctgggacgacctcgatgcggccctcgtcgacgcagccctccttcttcggtcctcaccccgacgtctcgacaccgacgctgacctcgtcaccctacctgctcgtctcggtggcctaggggtcctctcgcacgccgaatgtgctccgctcgccttcgcatccggctcagaggcagccgaccgggcgctggcctccctccctccccttccgccgccaccctggtgcctgcaccactggtagacgccgtacgagcttctgcggcgcaacttccggtcggctcagcgagcgatcgaaaaggactttctcgcgctcaatgcgcttgtacaagaggttcagcggctcgaggccggtggggacgacgctggcgaggcgagacgggagcggctcggcaagggtgaggagcgggttcgtggccttaagcgaaaggtgcggccttcaatctggtcaccagcgcccccagccggcgtacacggctgaatccacgctctggccgttgtggtgctcggtagctggtcgacctcctgccgtcgacatcgcacccgcccgcgctccgggctaggctcgaccatctctctcagctcgagatgatggagcacacgaccgaccccgactttgcctcgtgcttaccgacctcaccaacgctactagccgagcgtgctcaacggccgctgactttgcttgcgactgtttgcagatggtcggagaagcgcttctatcgaatcctcgttgactacctcgcccggaccggtcggccagagactgcgcgcacgctcgcccaggcggcccgcatagaggtcggtccggtccgcctccgccttcgcggtctgtcctattgtcggcactgattcgagcaattccctgccgtctcagtcgctcgtcgacgtcggcctgttcgaggagctcgcgcggatcgagcgcgcgcttgacagcggcgtctgcaccgaagccttgagttggtgcggcgagaatcgcgggacgctcaaaaagaacgcggtacgttccgaggacggccacttcagtaagccagagccggatcactgacgcactcggctcggtctgctaggactcgctcgagtttgcgctccgcctccaggagtacatcgagctctgccggcagcggtcgacgacgacggcgctgacgtacctccgcaagcatctcgcgccctggtccgagtcgcacatggccgagatccggaaggcgatgggtcttctcgcctgcgatgagccgacgggccggcgagtgcctgcctatgcagcactctacagccggagtcggtcgggcgcgctccgacagcggttcaggacgacattcctcagcttgtacggcctgccggctgagccgacgctgaatactgcacttgctgtcggtctctcggccttcaagctgcctttctgtgccccgtcgccactgccgccctcgcaatcggtcgagacgtacgggtcgtccgatgcagtagctggaccatcgttcgctgcaccaactgtccgcctaccctcgttctcggcgacagtcaactctcacccgctcgccgccaccgcgcaccatcaacacgaacggtcctgcccaacctgcgacgtcgacctgcacgctctcgctcaaagcttgccggcgagtcaccacatgacgtcggtcgtcgtctgccggatctcgggccgggtgatggacgactcggaaaacggccggccgatgtgcttcccaaacggctacgtctactcgtacggcgtgcgtcgctgcccctttttcgccttctgtctcctcgtttgctcatctaatccggcgctgactctcgccgtgccccacctcaggcgctccggcagatggccgacgagaacgacgggctcgtccgctgcccgcgatcgggcctcgagtgtgatttcgacgaccttcggcgtgtctatatttcgtgacggaaccgatcgctgggctatcatctcctccccttctaccctcttctggctatcgatgggcacccgcctcactcaaactgcctggatcgatcgcaagacagctcatccaaaaaaaagcgcctctcccgctgagcctactcgcgccccgaattcgcttcacctacccgcgctcatcactcagccggagtcgaaatcgatgatgggccgcttgttcgtcaaacccctcggaccagcctcgtccccgcggccacataaaaggcggagccagagccgggcgtcgcaaatccttttccccttgaacctgcagtgctactggcgccctgcttgcttgtcgaaccctcacgatgcgtttgacccgacggatcacttgtcagcagcggtttgagacaacaggcatagtaccaatgccgggtcgtccatgagcggggctgcgagctgcagccgagtgagaagagccgaactgcaaccgccgcagcccgaccctcaccaccccatccttcctcctcccatctgcttcccgcccgcagccaaccctgctgggccaaacgccccgctcgcgccgaaacgctcgtacgcccggccggtgtctgcgcagtcggacgacgcgcgaaggtcgagtgcttgcgggagccatttctcgagggcctgcgtgcgcgcacgtgcgcgattcagagaaggcagcggggagggagtcagttctgcgaccttgatgaaagggggtgagagaggggggcaagcagcagcgactgactctaatccgcttggaattggccggatgggtcgacgcaaaatcgagcgacgagacgacgccgccgaagccagatttagaggccgtgtcggccgactccatccgagtccacatcctgcaagggcggacgagcgagtgtagagagcaagcgagcgagcgcggtggcgggaggtaagcgcggaggtgagcgagcgcagggaagagggtgagcgagcgcggtcgtcagctttttgcctttggcttatggcttgggagaaagagcaaagaaggaggaacggactgcggcgcctccctcgggtcaaagcatgccttggccatcagtctcaggccaataaagtcggctttggagtgaagagggggtgggggaggagtcagttcagacgatgacagaggggctggacccgaacgggtatcggaacgcaccttctgtttcggcccggcgggagttggggagcctttttttttttcagcccgccccctctgccatgtcgcccgccgcccacgcaaccgcgtcttcgcactccgcctccgcccacgccccgcacctgccgagttcgtccccgctcctgcacgcggctcgcgccaccccgaccgccactgcttctttgctgaccgctcgacctgaccgttgaacagcccgcacgcagcgcaccggcagctccgagagctccaactcgtcgtcctcgtcgtcgtcctccggctcgaccccgccaccgctctcgttcgccccgacctcgtcggccacgggcaagcccttccgctcgcgcaggtcggtcgtcgccctccggcaccacaagccgacggccgagtcgtgcccgattcccatgcgcctccaggcgtcggccctcatccagtcgcccgagtcgcccttccaccagcgctcgctctcgctcaacgccagcgaccagctcgcgaagcgcaggtcttcgattacgggccaggcgtagtcaagcgcccctcctcggccttccctagaggaagcctggtccgccatcaacctagctaggccggcctgccctgcagaagggctaccgccgcgcctcataccctaccccgaccacggactcgacaactcggccgcactctcctagatgccgccgccgtctgtcttcggtcgtgccgtcaacaaccgccaccggccaagagcgccgctctcgcacctgcacgccgcgccgcgccgcactccaagtgcactgccgcctcgccgcgcgtcccccggccgtcaggcgccgtcgccggtcgctcgtcggccacctgcgtcccccggcctcctcttcggcccgcgtcgcgacgactcgcttgcgctttgcctgcgccgagcaggccgctcggagcccctgcgtcgcgagacacgttctcgcgtccggatgatacagatgatcctggccatactttttctcgcgctctgaaaggcctggtggcagtggcgggcaacgctctgaaagaaggcgagggcggcagccatggcgttcgtggcgttcttggtccagaggactgcgaagcggcggatgagcaggaggaagaaggggaaaggagtgcgaacgacgaggactcgcatcgagtcgcatacgccagtcggatgaagcacttgccagacagccagactggaggcgcaactctcaccgcctcgattctcgacaaagcagcgccatcagcaagattgccgagcggaaagagggcgggacgaggcattggatcggcaggcgagtctgcgctaccggagcgcgaaagaagtctgcatgcgaggtcggcgtcatacagaagaacaggtccgagagtgaagcagagagagtgagagatccgggctggatatgtaggcgggagaaaagatggagggaaaaggcgggagggttgcgcgccttagaagcccttggggccggcaccggccgagacgaccgagggctggcaaggggcgaggaggctaagttagcgagcggggagaggcacatgaagagacggcaaaggcgacgcaccacctggtcggcgttgatgagcgtgtacttgtagccgagcttggcgggcgtgagcgagcccttgcccgagaggtcgggctgctcgatcgggttggcgacaatgttgccagtggcgacgacgaagccgccctcgagcttggtctggatcgggttcttgacgttgtcgaagctgtgaaggagaggccatggcgtaagtagataggtcgagcaggagagaagaaggacaaggcggggacttgctagttgttctcgatgagcatctgggcaccgaggcggctgttgatgccggagccgaggacgtccttgtagtagctgttgaagacatggccggtgccgaagcggaacgagggaaggcgagagttgacgtcctggaggtggagagaaggagggtcagagagttggcgggaagaaggaggggcacgcaaagcgactgacgtggtagtagttgttggcgaacgtgatgcggagcttgcccttgtcctcggcgccgttctgcgatgggccgggaagaggtcagcggcccttccggaacaaaagattgagagtctcgggcacgcaccttgtccgagtggccgacgagcgacgtcttccacgagttggagaactcgttccacgagatggtgatgaagtcggaagcgtgcgtcacgtcgagctgaccatcatagtcatcctttccggagttgaggtcgttggcgaacgagcagtggtcgacccagacgttggtcgacttctggatcgagacgaggtcggtcggcgcgagcgacttcgagaaggcgaggccggcgatgatgacgttcttgacgtccttcacccaaaggcctgtgaagcggcggacgagagaagatgagaaacagcaagcagcacaagggtaacagacgagcagcaggctgcgcaccaccagcggtcaggccgtccttgcccttgccgttcttggggaggatcgactgcagccgaaagaagaccgagagtggtcagcaagcctacaagaagagcaagtcaaaggaggacgcaccgtgttcgagccgaccttgatgggctcgccgttccccttgatgatgcctgcagaaaggggtgagaagcaggtcagtcgtacaaccatcgtatccgtcaaagggacggcagacgcaccgctgacgtagacgatctttttggcgtcgccctcgacagccttggtgaggcccttgaggtcggtgacagtgaccgaggagccgccggtgccgccggtcgtgccgccgttgagggtcgcgtagccgacgggcttgccgagcgcgcgccggctgaggtccttcttctcgaccgaggcctgcccggcgagagccgaagggacgagcgcgagcgcgaggagcgagagggtgctgagaagcttcattgctggaaggggaggtggagggggcgggaggtgtgcggtcagccgacggccaagggagaccgagagaggggggggggggaaggaggaggacgcacgaccgagcgtgaattttgagaatgtgcgcccggccctcgttgtcgggcagcgagaactcgactcgccggtcgagccggccgggccgcaggagcgctgggtcgagcgtgtctggcctgtgtccgaggaggagggttgtcagtggtggcccgacaagagcgcaacaacccggcaagaaagaaggccccaccggttcgtcgccatcaggaccttaatgttgccccgggcgtcaaagccgtcgagctggttgatgagctcgagcatcgtccgctgaacctcgttgtcgccacccgcaccgtcgtcgaaccgcgcaccgccaatcgcgtcgacctcatcgaagaagatgatgcacgccttcttgccgcgggccatctcgaagagctcgcggaccattcgcgcgccctcgccgacatacttctggacgagctcggaaccgatgacgcggatgaaggtcgcgtcggtccggttggcgacggcccgggcgcagagcgtcttgcccgtgccgggcgggccaaagaggaggacgcccttgggcggatcgattccgagcatagagaagcgttccggctgggcggggcgacgaaaggcaagagaagcgtcaaccacctcatccgcactcaagtcgagagaggcccgctcgcaggaggacgcacctcgagcagcggcagctcgacaacctcgcgcagcttctcaatctgctccttgcagccgccgacgtccgagtacgtcacgtcgggcttctcctcgacctgcatcatcgtcacgctcgggtcaatctttggcgggagcgggatctgaatcttgtagtttgtccggtcgacgctgacgggagcgagaaggaaagggagagagtcagcggcctcgttctctcgcccaggccctcgctcccagcgacagagtgctgcagcgcgcgcgcgactcacccgacgcgcatcccctcctcgacgtccgtcggcgcaaccttgtcgccgagcccgacgacaaatttcgctatctgcttgatcgagatgacatacttgtccgactcttcggcgtttggcggctggacgccggcgaacgactgggcaaagtccgagggctggtttgcggggtcgacggctggacgggcggagagggcggggagaaaggtcagcgcgacgagatgaaggaagtagtagggacgagctggacgatttagactcacgggccgccttgatgatctttgtgcagcgcgcgacctggagcgggtgctccgacccttgccggtgctgcccgacgaaacgagaagcgggacgccctcagtcagccctgacttttcccataagtgtgcctcctcgccaactgaaccgcagcccagtcagcgcatccagccaaaggaaggagcgcaccttatccgatgggatgtcccacaggttcggcgcagcgaggcccgtgtccgactctttgatcccaatcttctcgttcacgcgcttctggatgtcgacaatgtcggcctcgaccttcttcagctggcgtgcgtaggggccttggccctgtaagtgcgttcgtaggtcggaagggaaccggtcagcatgggaaggggttctggcaaaggggcgagtggtgggcgagcgggcggcgggaggcagcagagccaggagggataacgagagacgcgggacggacgtaagtcttcaggatctgaatgtcatcgtcgtcgagcgctgtttccgaggaggagcaggtgcgagagggcgatcggtcagcctcgagtgtggctgggtcgcagtcgcagctgggcgggagcgtcggcggagcgagccgcctcgtctcgagctgccgagtgcgcctcgctcgccgagacaggccagactaagccaggacgtaccctgtatcttctcgtcgtccttgccatcgaccttcttctcgtctggcgagtgcggtggagcgagcagagcgggtcagcacgagactggccgatcatctcgagcaagcaggcgcgcgttctgggctggagagtcgagctcggagggggaccgacacttctcccagtcactgcgtagatgagagggtgtcagctttttgagctctcgtagcacatgcgcgagtggggcggacgctttgggtgccatggcgttgagtgtgttgctgtgagcgtggtgggtgatggtggtggtcgagctggcggtgagccgctcgctggaggctgcggggcgcgagcgaacctggggtcgtgcatcgagcagctcggcgcgcgctgatgagcccctccgacccttctctcctcccctgacgcaacccacacctctcccttccttcctccctttctcaacccgctctactctttcgccaagatggtcagctcttgactggctgctggtcgattcgaaggagggtggctgatgacccattcccttcccgctcgctcgcaggccggcgcaatggaccgcgctcagaaggagatgccaaaggtacagcccatcgactcgaatcgactcgcagtcagaccatgcccgactgactggcctgcccatcgcccgcccgccatagatccgcgacgaagaccgcgagtcgcgctacggctccgtctttggcgtctcgggccccgttgtcgttgccgagaacatggtcggcgccgccatgtacgagctcgtacgtctccgacgtcctggctctgacccgcctggcccgtgctccctggcttgggttgcttgagctgactctggcgacgacgatgacgatcacgcctgcaggttcgcgtcggccaccaggagctcgtcggaggtccgtcctccatctctccctctcattcaatcggccgcaccccgccatcgcgcaccgacctgacatctaaccccctctttcgtcccccacccgctctcgcttctcctgcagagtgctactgcgacaacgtcatctcggtctccaacccttcgaaccagtgcaacatgggtcggtcctttctctccttgccttcgttgacagtgcgcccagactgacccccgcccccttttattcacagactgctcgggcgacgcttccaagacgtgcggcggacctcaggcgctcaacatctacaaggcgacggccgccgaccagaccccgtcgacgctcaccaacggctggaaggaggagcggctctgcctcctcgacaaccagaacggccggcttttcaacggcccgacgacctcaagccagacgatgacccagggcgtctgcagcgacttctgcggcaagcagggcctcgacattgccggcgtcgagtacggaacgggtgcgtttgctctcttgctccccgctctttcctcctactcccagtgctgacctgcttctcccctccctcagagtgcttctgcgccagctcgtcgaccgtcaacattgcgaccgccgcaaagtccacccagtgcgacatgccttgcgcgggccagcaggtccagcagtgtggtggtagcaatgccctctgggtcctcaccctcaccaagtagagacgcctccttcctagatttctcgcctttgcctttccccggtctccctcctgctgcatcacttcctccctgcacctctgcccttgttgttcgccatttgcttgccgcctcgcggctctccctcttccctttttcgcagcaattcgcatcccacgctgcctttgccatcccatgcccccttacgaaccgacccctggccgcctgctgcaagagggcgatgctctcgattcaaggcgcagattggcagacctggagtttcagcggtgctgtagctgcacgtctgcttgagtcaagctcctgagatcacaggttgtagacgggctggagcctgctcgggttgagttcctggcggcagagagggcactcctcctgcaagggtagtaggagcgggtcagcagccacttgtctgcgccgacgagcgaaggggtcagcaccttctcggcgctccagccgacgatgcacgaccagcagaagacgtggccgcactcggtcaccgtcggcgccgcccacagctcgaggcagagggtgcacttgcgtccgtcccgctcgcgctcgctggcgttggcgggtagcgggtcgaagtctaccgtcggttccgacgccgcgtccgggctgagaggaagcggacctgatggtagggtgaagggtgaccgagccggagcgagatccttgtctgacgcgctgttggcggcgacagcgtcggccgaatgaagcggaggtcggggccggatgaggccgagaagccgacggagaatcgggaagaggagtagtacgccgaggagacggtaccgaggactggagcgctgctcatcctctgccggaggcagcgtagagatctgcagcgagagggccgccaaaagttagccaggggctgagaggtcgcgatgagaccgaagcggcgacgtacgtaacggataccggccagccgcttgccccattcgagcgggccacctcggaggaagaagagcgcgaagccgagctcgctcgcgagttgggccaaggcggcggagtcgacgagtttgtcgagggcggctttcgcgcctgccataagcgcacggcgagacctgggggtccggcgctcatcgatcgcaagactgtcgtccggttctgacggctcggcaaagacggaaagcgagcgcaagtatcgcgcgaaataggccaggccgtgagggatgaagatcgtaaagagaagtgcgagccgccggcgctgcatgtaggcacgcacaagtactcgtcagccggaaggcacgagttgagctgcgcaggggaggacgcaccctggggctcgcgaccgagaagcgtgagccagagtctatgaccggcaggacgtcgacgtactcctcgccgagcgtctgcgagccttcagcaaggcaagggaaaggaagatggcgacgtcaggtcacggtcgtcggaggcagcgcgcagagcatggcgacaagcaagtgagcgagcagccgcacctcgcccgaatgtcaacccatagtaggccaacgaagcgacgatctcaaggataggacctttgtcgaggagggaccgctcgcctgagagcaggttagggaaggatgccggtcagcgacaggcgtcggctgggaagccgagctgcgggacaggacgcaccgagaaccgaccgggcgacatctctcgtcaggcccgttagacgaccttgcgtctcctcgtcacgctggtgagagcggactagcggcagtgtgaaatgcgtcagctcaagcccggccaggaggtgaggccgtcggcggcgcagcgaggacgtacggagctcctgcgcgccggctgctgcgaacgtcgtcggcggcgggtctgacatcgagtgcccgggtagcattattgcagctcggatgaccttgtacaagaaacgagcaggtctgacgtcctcccgtcactccggccttgcctttgacgaggagggctggtcgttgcgatgctcatcgttcaaagcccacggccggcccgagctcgaaccgggagccgccggcgggtcgcgtcctgcaggccagccatgacctcctcccaaccgactgatgcctgtcaggcggctcatagcaggtagggttacatgctgacctgatcgtacgcagtctgattagccttctcctggtggtcgcctcggacgagctcgcttggacggccggtctgcctttgccgcctcctgtgcgtcacgtccgggtccttcttcgacccaatccgacctcgtcgtcgccgtcttcgtcgctgctccagacgctcggcggtcctaccctcgctactgacggctctgacatcattcgactttgacgttggtcgttcagctagtcaaggattgcgagcacgagcatgaacacatgcgggtcccgtgggttgaacagcgcggggccaacaaaggagcggatgacctcggccgccggacggtcccgagtctccgagcagaccttggggtcggtccagaagcaaaagagccggcgcctatgggtgacccgcgacatgcgcccgccgaggacgttccaggttgatgcgctttggccgaggccattgcggattgcgtcgacgcgcgagagaaggtcggttgcgcggcgggagccgagggtgccggccgagccgtacgtctggacccacgctggccggatcaaggctagatgtttctcgagcgtcgtctttgcggcagcgaccttccctaagtcgacgtcgacggtgagcagacgctcttgaagggcgagcaagacgagcaggtctttcggctggtaggaaaggacggcgtcgacgacgcggtcggcgacgatgcttggcaagggctcgcgacgcgcgacggattcgataagatcctaagccgacagtgactcgacggaaccgcagaacgcggccgtcgatggcgtgaggtcctggaggtcgcagagactgggcgaggcgaggtactttacggcgtcggtcggcgacgaggcggctgagcgagaggagcacggctgggtgagcgggaggtcgtcgaacgagaggcacagccacgaagagacgtaccgaatcaggtctcccacaagtcgaacaggacaggccgttcggccacatcagcggcgacggtcgagacgcccgggaaagcggcctcccaggctgccgcaactgagccgagcattgtccggtggtgctgggcgagaatgacacgcgcacgctggacggtctcggccgcggcgcgttccggagtgacgagactggacagagtggatgaggaagggagcgacgtccaggctgcaggccgggcggcgagagcggccgcgtcgacgtgcgtgcccagagccgaagcgacgtcgtccggcaagtcgaccgcgacccggagaagctcgagcaagagcacccggcagactgggtcgtcgagctgatgggcggcggcgatcgtgacggcgtagggaagcgacaccgaggctcgtccatcggtcttacgaccgtcgaggcactcgagcagatgtgaccggaggacctcgacaggcaggttcgcgaggagagggtcccaggcggtccggatctcgggcgactgcaaaggtgaaaggggagtcagcgccggatcgaatttgaaaggagaggaaggaccgaccatcgaggtctcggccagcttgagcaggatccacccgatcttgccggccgggagggacgcgtacttggccggccaacttccgcttcacttgacgatctggcgctcgaggcgggctacagctagctgtcgttcgaggccgccgaccttgccctcgtgctgcttgccggcgagcgacaggatctggagcagggcgaccggatgaccaaggtcgtagcgctcggcgaggttgatgagtcggccggtgctggcctgcagctcggcaagctcgtccttgtcgatcgcaggtccgatctttctgctctacttgccggcgcgaatgacgaggatctcgaggcagagggccgacggcggttctgtgggcggattgtaagagaacaggctcgggtcgtggaggagcttgatgaccgcatcaggagcgccgttcgctggatgcaagagaagaggagacgtcaacgacagggctaggagctctgcttgaacgcctgtagaggcgactcacctgcaagtgtacctcacgagatcggctcgccgtatctgcagatgtgcttgtagtcgaccggctcgaaagcgatcattgcccgcgccttctggccctcgaacgtctgcgggaagcgcttgaacccgatggccttctcctagaagaacttgccgaggtcgacggatacgagcggcttggcttcctcttcggccaagagcgcctcttcggacgctgatgaagtggagggcgtggcaacagtcagcggaaggaggtaggagcggcgagtgaagatgggatgcacggtaggagagaagggtctctccaaatgggctgaagtgcgcgaactcgtcaaactcgtcgtcaacgtgccagctaaactcatcgtcacgagcgatcgtatcgaattgggtaaaggtgacctcgttttcgcatgctgacaaaaagcacagacaggagcgtcagctggaggtgcttggggcgaaacatgcggcgcaagaaggtgactgaccgactggccgggcagggagacggtcagggtggaggccaagatagcgctgctcttaccggaagccgccatcaagaagcgtggatgtggtggcgaaggcccggttcgagtgaggtcctgaaggggatggcaagacggcgagttagcaacgcgatggagtcaaagaccggccaaggcgctctgccgccgctgacaacgcaccggcgacaagagggcgagcagcagcgaccgagaggaggtcgctgagggcgcggacgacgagccgcatgtcgctcgagctggtcctggaggggctgagagggccgaggggtcggcagtgctcgagctccagcttcgctagagccgctcgtcgcagcccgggcagccgctcttccgaactcgccggccgaagcaggccgccaagactgagctgagacggcacaagtcggccgtagcgagcaagagaggactcaatgctggagtcgactaggtcgtagttagagggaaggaaggacgccgaggccgaggccgagcaggcgagggaagggctgccggcggatgaaaggggtgcttcagaatgaaaagggaggctgccgagcgaccgccgtcaatctgcgaggaccggccatcagcgatgagtcgtcgtgctcagcagacaggggatgttgaggcgtagtcctcgggacgacggggtctgcccaatccggcctgcctccttcagcagaacccgtcattactggatagccaagccatcgttcggtgtcagcgctccgtcggcggttagtgagcgtctaaaggaggtgatggtgctctggcgcaggagggccgcttgagactgatgggcgacggctgctgctgctggaggggagttgcgagtggcgttccggagggcgtcgagtcggcggccgccgcagtaggtcgagagagcggggcagctgcagcgggggaggaggacggtcagtcgacgtccatctgcccttgcctcctaatttatccagactggcaacgcctcccagacatcgatcagcgggaggagctgatactactcgccgccgttgcctggccgcagtttgctctctgcagccaagttacgcgcgaggccatgacgagggcgagacgagcgggcgggcgggctggctggcgagcgcatgctgacgccgccgagaggatgtgttgtgcgccaaacgaccgtcctgtggtcgatccgggtggtcgttcgaggcgggcaggagagcaagcctgcagatcggggtcgcacgatgtgcctcggctgtcttgtcgggcgtgacctccccagcctcctttcgggctcattgaccacactctcctcaagcgacctggcagcgtgacctccggcgacaagctcacctatcggctctcggcgccagaagacgggaggcgcagttccacctgcagtcgctcgctgccagcttttaaggccaccggctgcgtctcgagcgcgcatctagccgacgaggtacgtccgctcgcaagttcacctttgatgcccgtcgccgacgtcgctgacgccttcaatcacgctgacggctgtctagatcgctggcctttgcgagacggtgaggggcacgggcgccatcttcctccaagcattcgaccagcagggcggagcgaactcgctgtgcgtcggctgcccgtccgatgtgcgacaggcggccgaggctgacccttcctctcccagccacgttgtctttacgcaccgatgccaacatcaacagcgtcagagccattgtcgagtcgttgcagagcagatgctcgacgtcgagctcacgctcaaggtgcgcccgacttgagtgacggaaacgagtgcgaacgctaacgctgcctgtcgtcgctctcttgtcttgctctcctccggccgacaggacgcggcgtttgtcatctactggccttctggcgaggactgaaggtcgacgccaagcgctagcgggtccgggccgacctcaattgggatagcgccgaccactttgcgcccaacgaccgtcttgcgcagcgactcgtctcgccacggcacctggcggacgatgttgctcgttcgtccctccccggtcccaaacgggctttagctgactgttctctcgcgcactcactcctcgcagccgccctcgttttgccggtcgacagcaatgtcatcaacgtcgcgttcatctcgcccgttgtaccttacccctttggcctgcccgttgtcgccttcgatcggcaacttttctcctcgaccaagaaccgaccgagcgaccgctgtgccagaccggtggaagggcgcgcagactggttatcccgtctgctcgcgtcatccagtacgcgcccaccaatagccgaagggcaacgcggatcgatctcggcatgcgcgtcactcggtccaacatccgtgagggcgtcgcgggcggaggatgaggccgcaagactgcgacttcggcggtcgtgggccttgcccggactgccgtcaccctctgagggttttggtggcagggaaggaggagggggggttggcaaaaaggacaggtaaaaaatgtctgatcgctgtttcgtgcttgtctcgcatgccaatcaccactctcgacgcgctgcagtcgtcacggatggccctgtcgacgttgcgaaggccactggtctctccgagcgtgaggcgccacagacgggccgtcgacggtttggaggtatggacagaaacccgcttgaagcgacaatgtcgccgcaagcaggaagctggtacatgccgcccatcgcgagtgtttgacgcgagggtgcagcgcttgccgagagcgccgggaggagtggatggagcgtcgtgctggacaaaggaggggagaggttgttttgagtcagtaccggtcgttccgaggtcgagcgaggagtcggtggggtagaaaagggaggaagattctttgttggtccgataggggtgaaagactaatttctgatgatattgttaatcatttccctagtagaggattagactgaactatgacgtggtatcgtcatcccaagaaagagagggaggaggaaggggggggggtggaggggcgtacgaagccaagagggacgccactcacgttatgacggtcgacgcgcagacgccgacgcaagccgatgcggaacccgaggccgacataagacgaccgagcggggaaaggagagacctgagagaacgcgagagtaggcaagggtcagtaaggagccgcaacagagaagaaaaaggggcaggggcgacgacgaatagtctagcgagggggtagatcagttatggcgtttgagttcctaaaatctctgtccgcatggagttcagaacaggtctgagataaatgttcctcatatcgagtgtcggggagtgggaggacgggcgagagaatagacaaactgacctgacgggcgggtaagggcaggccgacgacttttgcgaggcgcggagctcgaagccgtgacgaccttgacggccgaccggaaggccagcttgaccgacggacgactcgcgtgctaagccctgcccgaccagcaggagggctggaggatgctggtcggaggagagcgaggtcgaaagccggtcgccgacgacgaaaggccttgcttggactccaagtggccgtacgtcccgccggccccggagcgctgcttcttgctcgatagcggctgctcccagacgtgcgtcaatgaccgcacactcttcagctcgtatgagccctacgccgacacggtctacaacgccagcggccagccaatggacgttgtcggcaagggcacggtcaccgtcatgtcgcacggacgcaacaaggaggaggtcttccaggtcgccttgaccgaggtcttccatgttccggccctctcttcgacgatcctcgtgtcgctcggtcagctttgccaggtcaagggcatctcgttcttcggtgaccgtgacctcttgctcatccgaaacaaggtcggcatcatcctgcgggccaaggcctaccagcgcaacctctgggcgctcgacgtcacgctaccgccggccggattccttaatcatgtcgccaactacgccaagacgccgacgccggccgacctcgagatcgacctgctgcaccgtcggatgggccacatgtcccggaacgcgatggatgctgttctgcgttatcacggcgtgcttagtaatgcgatcagctcgaaggacatcaaggcctacttcgacaagggcgtgtgcaagccttgcgtcggttctcgtcagcacaagacgccgttcccgacgtcaacgacggtcgtcagcaggcccctcgagctggtccacacggacctacaaggcccgatgcctgacacctcgctcggcggcgcccggtacatgctcaccgtcattgacgagtacacggactaccactgggcttggtcgatcagggccaaaagcgacgcagccggtgtgctcaaaggctggatcctgcaggtcgagcgccagagcggtcacagggtcgtaacaatccgcagcgacaacggcggcgagtacctatcgaccgagtttgttagctggcttcgctcgctgggaatccgtcagcagacaacgattgccgatacgccgcagcagaacggcaaggcggagcgcgcgaaccggacgatcgaggaaaagatcacggccctcctgctcgagtcgggcctgcccggggcgtactgggctgaggccatgacctacgccctctacgttttggcccggaccgtccgaaagtcgaccggccggacgcggcatgacgactggttcggctcacccccgtcatttgaccggctgcgcgtctttggctgcacggcgtacgcgcacaatcccaagcacaagaagcaccaatcgaagtcagtgccgtgctggttcatgtgtccagcggaagacgcattcggaaagaaggcgtaccggctggtcgacaagcggaacccgcacaaggtcgtcttttcccgtgacgtcgtcttcgacgagggctggacaatgcgcacgaagggtagcgccagcagtgggagcggccagacggccacgatgacgccgttgactggccagatgccgctcggacttgacctttcctcgcctccgtcgggtccggcggagattaaggatgtcgcaggagtcaacttggaggaggagaggacgatcgggacggatgtcgagaccgttagaccggaaaccgacgacgagtcgggtgcgggcgtcttgtcagaggacgagctacgcgaggaggaggaggaggaggaggaggaggaggaactggccccgctgccggctgtacctcgtttcttcgtggcctctaacccctccctcacggccacccgacgcacgtcgggccgcaagacgcagctgcctcccaggttccgcggactcaaccaggctaacgtcctgatcagccttggccagcatccccctccggccgcgccgcccaagacctacaaggaggccgtcagcggaccctaccgggccgagtgagaggctgccatgaaggccgagctcggtcagttcgagaagctcgacgtctggacgctccgtcccgtcgatgcctcgtcgccgccgcctccagtgatctcgggccgctgtgtctacacctgcggcccgacctcggaccccgagatgaccaagttcaaggcccgccgggtcgcccgcggctacgagcagcgcgagggtacctttggtgacacgtactcacccgtcgcggatggcacgtcccgccggacctttctcttgatcgtcgccaacgagggcctcacgatccgccaaggtcacgtcaagacagccttcctctacgccaaactcgaggagccaaatctgaatgaccccaccggccggctacgccgactcacccgatcagctgtgctacgtcagctcggccgtctacggccagcgccggtcgccgaaggctttctacgaccgaatcgcttcgttcctggtcagcatcggcctcgtcccgattgagtcggacaagtgtgtcttcctcggtcagcggcacggccagaaagtcctcctcatgctgtacgttgacgactttgtcgtcgctggctcggccgagggcgttgccgacgtctttgcggccatcgggcgcgagtttgaggtcgacgaccaaagctcgctcgaccctggtgagctgctcggcacggagttcacccgggaccgggcgaccggcacggtcagcatcacacagacggcctacattgacgaggtcctcgaccggttcgactcgaccgacatcgctccgcgccgcacgccgatgaactcgaccctccagctctgggatgccgattgtccgtcgaccccggacgtcagcctccgcctgcggtatcaggagttagtcggctgcctcaattacctcgtcacctgcacgcgctacgacctggcgtacgcagtgggagtgctgtcgcgcttctgcaataaccccggcaccgctcactgggaggccgccctccgcatcctcgcttcccttcgtccggaaccgaatgacagcatcccgtccttttcgctgcaggcgcaagacagcgacgagcttcctgcagcgtcgagcagtcttctcgtgcgagcatgcgagcgaagaccccgccaacgaaagtaacgccccgcgtccagggggcaagggaaagggtctcgagagagagggagaggagggtcgagagacgcacgccaatgatctggttcgagagccctgcgccaggcgcagctgtcgcgtacttgaggccggggatcaggccttctctgaacgtttgacttggggagggacgacgagggagggagagagggagggagggaagaatgtcagacgcgtagtcgagaggagagagtggcgaggagagtagggagaagaggtagacaggaagggaaaggaaagggacggactgaggcccgttgggctggatgataccggccttgagaaccgacggcgaggaggacgacgacgacgacgacgagctactgctgctgctgccgctgcttgacgcccccggatactcctcgtcaaacacgaccgccactccctccgcccccgaagacgaagtagactcatcgaagacggcttgcgacgaccgatgttcgcgccggccggcattaaccgagccgcagacgtagaggaccgatgtgagtgcgagggcggttagaaaagcgatgtacatcctcctcctgcgttgggtcgtccgtgccggtccagcagcggccgccgtcgtcgccgagaaggagggcgaagggaggcatgcgaagctcgaggaggacgaggacagggggtgctctttaagcccagcttcgttggaggaggagggcggcttgggctcggctgaagaggaggaggaggaggaggaggagcgggctgagggaaggagaggcgaggacgacggcgtcttcttgtgcaggaacgagacaggcgtgaacgatgtgcgcatcttgagcttgctgcaaggggggtgaggtgagcgttgattgggagagagaagagaaagaaaaagaagaagagagagccggctcgcttgcttgaagaggaggaggggagcgcatgcatggaccatgtgtgtccttagaagcgagcgggtaggtgtgtcgacgacgggatgggctgcccggcctctcgctccagaaaccccggccagcccggcgcacgcgtcagaggctggtcagcacgcgaagaagggaggggcttgaaggtcgacgtcgagggtcggacgaacggggagaggcggggagaggcaaagacacgggccagaaagagcgatcgagcgagggttgctgcgcgcccgccctcgtcgctcgctgttgctccccgctctcgtcaaagcgtccctcccctcccttcctggctgctccaccgccgtcccgtcttgcccgagacggatccgacaagctggctgacctcgacgagatgctgatgcttgcctctatgtgcatttaaaggagacaaaggatgttggctctcttcctcctccttcactcacccctcgcggcccagctttgtcagccatgtcctacctaacccccgccgccgtggcctctcctcctccctcgccgtccttctcgcgcccagccaagcacgctgcagcaacctggtcatcagccatcgttgtccccgacacgcccccttcgacccctcccctcgcccaggcaagccacttcggcccagcagggcttcacgcccgacccgcaggagcgcagcacaagctgccggttgtcgtaaggagggagctctcggctaatgagctgtcgtattacttgccgtcgagggcacagggggtgaacgacatgtgcgtcccttcctctttccccctttcaccctcattgtccttctcgcctctgcactcctcgtctcctttccccctcccccgcgtcctctcctcccgcccttgccgtcctctccctctccatctccttcttccctcctctgtccgtcccatcactgattcctgttcatgcgactctccgcaggtaccttcatcaccgcctctcgctcccctccccgcaagccaaagccgagctcctcgccccggcccggctcgagcccatctgggccctccttcgactccgccacccgctcctcgctgcaagggtcgtccgcctcgaacttagcgggagcgctcgcgcgagcgcgggctcgggcgagggtgagggtgaggatgagagcgagggcaagcgacggggttgggcgtttgaatgcactctgccggcggacgttgaggacgcgctggacgaggcctggggggcgttgagctttgtcgagggcgagacggacgacggtcagttcccccttccctttcttctctctctcttccttgcccctttgccgcacccttgcggcttccggccctctccctttctgactcgggctgcttctctctcaacgagcgaaaacgggaaagctgacaaactcacgctcttccatctcaccgccgcccgggggtgtagagcttgtcgggcgctacttgaacggaccccgccagctctcggccgaccatctctcgcacttgacgttttcgacgccgccacctgcgcattcggtcgcctcctcctcctcctcctcctctacttctccttcctccggcaccggcaccgctgccgccatcgtcgcctccaactcgacgacgacatcgaccgaggccggtcctaccgccagcaacacgaccgtcgatgtcctcctgacgacgactcactttgtagccgacggcattgccctccacacgctctccaacgagctctacacgctgctcggcgatctcacgctcgggcctgcgcagctcgaggggatgctcgaggctgagctcgagcggaggagcggggagggaggggtcgaaggggcaggagagcggtccaagagcggctggaaggcaaaaagaaaggttccggcatctatgggaagtgaaaatttagaggccagaattttacttctcattgatgcagaaagggttgctatttttggaggcgccgtcgcaggcagacggtgcagcaagccggcgcggacgactcccctgccatttcactacgacgcaccctcttcaacagcaaccgcatctacctgtcgccgtcgacgccgtgcgagcgacatgtgctgctcgcggccagccactctggtcgcaagtctggaaccgactgggaatcaaaggcacgcagtctgccctcgctcgacgcgcccgaggccaggtaaccatcgatcgcatcagtcggctgtgagtaagggcctcaaccaagcaggctacttacccctttctcctggggcttcaggcctcttcgacacgacatcgcatcgtaaagctactacatcgcctcgcagacgttgcctcttctggccgaccagcctcagcttagcttgactgccatctcgtagcgtcgcaaagcgcacgaatcgggcgtcatatggacgctgcaaggtcatgcaatcgtacacacgctaacttcctgtacaatttccgccagagttcggatcgtcgcgcccagcctgttccggactgttgagagaaggacgaggcggagtgagctacctagagtgggggtcaagacgtgttacaagcggtgggcagcggagcaggaaggtgggactgacttcagtcaccaagaagtggactgaggtctctttggcagggaggggagcggaaagctaagagggagggagaaagagaagggatgccgatgcagtccgcgggtcaggagtacattggtaggcgcgcagtcgcctgctgccgccgctggctctgcgcgccgcgccgcactcgtcgcaacttcaacacggactctggcaacacggtcgactctgacgtagtccttctatctgaggccacgtcagtcgcggcctcctttggctgcgcgctttgcgcggcgacgctgaacctctgctactcatcaagggctgcggtgtcaaggggtaagtggcgagcaaaggggagggtggagctctgacgggcaagtacaagtgataggaggaacgaaaaggcaagctcgagagcagatccccgactcggggttcggacccaaggcctcagcccgcacggtagaagagaagtcaagcactaccaaatccccacccgtcaccggttcacaaattccacgtggaccctctagcaggacacccgatcaccaccggccgagtctagacccggcaaccctcggccgccggtcgttctccggcaccagctcctccggcgtgagtcaccagcttcatcggatcagtcagcatctccaccggatcagtcagcaggcacagccttttcaaagattcttcgccaccacactccagcctacttaaacccctgtagacctcgagtcgccacctgaatctcaagcttgcctcttcgttctccccatcacatgtccttgcccgtcagagctccagcttcccacctgctcgccacttaccccttgacacagtgggcaccaatgaggaacccttttcgctgaacactagaaagtagggttgccatgagacggcgaaggggggacagcgaggataacagtagcacaaaaattgcgggtgcgaagagcgacattgaaaacagggcagcgtccgagagcagattggggagcgaggataccgggacagaagagggagagcgagaggacgggcagtcaagatcaaacctgaagagctgggcggcaacatgggatgcaagcaggcggacggcgggccgccagcgggtatatcatgagccgagattagcatttcggctgcctggccgaaagctgagcccggggaaggggggtcgatacacgggaaagagaaaggaaagccgaggttctagggcgctcggccggcggcaggagagccgactcggtcgaggcagccgacccttggccggcgcttcttaattacagatgccgacgactaccactggtgcaaccttcagagtgtcatcgtcggtgaaaagcttgtccctctgatcctctgtcgaatcctctatgaatatccaggttccagaaaaggttctcggatgcttgcttcgagcaccatatcgaggccaagacccctctcagtgctggattgggcaacggatccaatgcagccctacgccggccggggctgggcgctcacttttattggttttcagtgaggctctctaggctcacatgagcaccttcgctctcgcgatgagggtcagctgcatgttgttctggcccagtctcgactgcgagccgtcgctgacatttttggctttcgtttgggcttttgtggtgcttccgccactcgctcaaaagtcgctcgcagtcgcaaccgttgtttatcgtcctcttatgtacggcataatggagtcttgccgaaacagcttcgggaccagcgcattatctagtcacgcattttctcaaagtagcgcagtctccgcccagctggtatcgagttgtgtctctgcgtggatttattgctttcgcttgaacccaaccaagtcccgagcttgttcaaggacgtgcttgcgagcgcgttacggtgagacgctcggttactcctgcttgggaaataacatcatcgccgagatgttatgcgacgaagctttcggcgtaaaggattgttcccttcgtaaccgtattcacctcactcaaagtccgcgaaggcgattcgattgattcgctccactcgtcgccgggtgcgctagtaccgatgactgccctactgcgcgcatctgaaccaacgcccctttttcagcgaccctcccacgggaatgatccgccggccgctaactctctctctctctcccctttgcgtttcgccaggactacgtcttctcgctcctgaccggctacgtcgaccccccggccggcgtgacggttgccgagggcatgaactacaacccttacttccccggcggcgcgatcggcatgggccgggtcctctacgatggcctcgtcgagtacgacgacggtcagtcctcctctctctccctttccgtccctttcccttcccgcgtccccctcgtcaattcgactgacatcctttcggctggctcctctcgttcgcacaggcacgccggcgacgacctcgcagatggccaaggacgtgacgaccttcctgtcgtggtgcgccgagcccgagctcgacgcccggcacaagatgggcctccaggcgctcggtatcctctcgaccatgtggttcattgcgctctacgtcaagcgctacaagtgggcgccgatcaaggcccgcaagattggtccgtcccctcttttgcgcgggtcgtttgctcttcttcggagcggttgcgttgtgtttccgatgactgacgtctctccctctcgtcggcttgcttccctgcaccccttcccccctccctcagtctacaaccccccgatgatcaagaagcactaagggcgtatgggcgaacggcttggagagggacgaagggatgcgggaggaggcaggagtgggctggtggggttcgcgcgcgccagacctcggacagagcgctgggcaagttagatcgaacgaagttttggagagctcatggttcctcagatggaaagagcaagcgagcgttgggaacatgtcaggccgatctgggtcgtcttggaccttcgtagggcagcagcgaacgtcggtggtgccagaaggaggacggacggccgggcgggctgaggtggatcgaccggctctccgtcccgcgtgaaagagccatcgaggaagagcgacgacgacgacgacgaccctcaactcgttaacgaccgcccgccatgtcgcttctctcgcctttcctccgccgatcgccaattcacgtctggtcgatgacagcgacgtcgtcgacgggcagcacgagcagcaacagctgtcatgcctttgccggcagcagcaccagcaccagcgccagcagcagccgcagctcgagccaccgccgagcgttccactcgacactgccggcagcgtcggctggtcggtccgacccgtatagggtcctggcgctcgaccgcaaggcgaccaagaagcagatcaaggaacgcttctacgaggtgcgtcggatctgggtttgggcgtttgtctggcgagggccggaggaggggcggcgaaggacgagctcgctctcccccccttctgctgcgtggtcgtgctcgagagactgatcgcctccactctccgtccctcccgctctctttctctgcgtgcgcacgtctcgcccttacccgtcctgcactctgccctcttcccgcccccgacagctctcgaaaaagtaccacccggacctccggcccggcgacgaggacgcgaaggcaaagtacctcgagatttcctcggcttacgacacgcttgggagcccggcaaagcggtgtgtcccctcccctcctccccgtttttctctggtgactcgtcactggcctgaaggcaggacgctaaggggctgcttttgcgggcggctcttgaggcgcgctgctgctgctgctgctgctgctgactgccgtcgctccgcccctgtgcttgctcgcaggagtgcgtacgacaactctgcccacggccggtcaagcggcggtggcggcggtggccctggcagcggacctaacctcactcggaccggtcgtcagtcgacctgggtccacccgtcgacgcgcatgggccctcggccaaagagcgcctccgggccctcggccgcctgggccggccggaggaagcaccccgctggcgccgatccatcgacggtctactcgaccggccgggcgtcgcccttccgcgggacggcggctggtttcgggccttatgggagtccagacggcgggcagcacgacgcttcggcctgggacaagattgcgcgcgacgagttctcaaagcccctgcgccggacgaagccgagcgtgtttgagagtgcgatcccgagccgatccgagctcgcgggcgagatccacaccgagggcctaaagaaggcctttgggctcgggatgatgctctcgatctttatcggcttgattgctggcttccaggggacgatgctctgggacacggatgatcgggcgacggacaagcggcggaacgacgatgacgagcggctgtcggcccgtcggaagcagcagtcacggccggcggcacccgcccagcagacgaaggagacggcggacgaaggcgaggggccgaagaagggccggccgccgatattatgaagcgccgtaccagctctgtccgctcggctcctttgtcgcgcaaagagaagcccatccatcgtacaagcgccgtgctcgcccttagaagggcagcgtcagacgcgcaccttctcgagtctcggaatgagcgcgtcccagtcgtcaatcgccttccggtagagctcgacctcaccgtcgacgagcccgcccaggaggtccttcatctcggcccgcttgacgagctcgaaggaagcgtgctcggaggcggttgcggcgctgaagcgctccgaggtctggtgggtcgagaggacagcttcttggagctgcacgcggggcaggcgaaagcaaaaccggggagaacgagcgtcagtctcttcggatgaatggcgggcaggggaggggggagggggtcggcggaggcagtcgtttgagcaagggaaggagtgggagggagggaggtttcagcgagtacgccagagcgacaaaggaggtgagcgttcttgttttgcactattgagagggagacctcaccgggccggtgcagacgatcgctgccgaccggcccttgtgacgctcatcatccaacagagaccccccctggcctacaaagcgcacgtaaaaccagcagaaacgcacagacgatcatcggcttcgtgctctctggccgctcgagcaagatcgaccggacggcggcgaggtagaagctcaagggatggggcgagtagccgtaggtgtttatcgtgctggccggggggaggaagacgtactttgcgagcgagcgagcgggcgtgcgggcgaggggcacgagatcggtcaggctcaggaagggcagtagagcgatcagggagaggaagcgcacgttatggacggccgagtcctcagcgaagccgcccaaggtcgctgttcgggtcgtcacgccccccgttgacggcgcgtcgtagagctctttgagctggtcgaggtcagacgcccatgggctcgacgaattgatgagcggtgggctgaggtagagggtaccgatgcgggcttgcgcgatcgtcatcgtcgtcgtactgctgctgctgctgctgctagtggaggagggcggagggcaggcgagatgggcggaaagggtgaggaggcggcgagccatgccaggctggattggcctgaggctggcgtccgaccgcagcgacgacgcgaggccgacgagccagcatcgctccctccaccccacgaccctccctccggcccgcatagactcctccttcctgcctgcatacacccctcccttcagccagtcagcaacgagatggacgaccagcctatgacgtcagtctcaacagcagcagcagcagcagtagcagcagcgccgcctccgatcgatgacggccacccgtttgacctcggcctgctcgcaaaggcctttgacggtgccgcctcttcctcctgttctcccgaccgagcagacggaccaacagcagcagcaactgacgcgaaccgactgctgcgtcctttttttcgactcgccgcaggccgcgccctgctcatccgcctagtgcacatcgcctcgctcgcgccctccctcttccccgcctgcgcagccctcgccctgcccctcctccgcaccgaaacctacgacctcgccctcttcgacttttttggcggaaagagcgacgatccgtggcgggctgaggcgggacggaaagcggcggacgagggcgagaggctcgaggccgagttgaagagcgtgacggccaacttgatcaaggagagcatccgagtgcgtccagcgcgcacgtcgggccttctcgctcttcagcttccgctgacaagctccctcgtctctctcgcttcgactcgtcttgtcccgcctctccctatacgtacacccgcacctcgcgccagatcacatacattgaccttgcccgcctccagctcaagtcgggcgacgcggccgctgcgctccgctcggtcgtccggacgcgcgagtacacgacgacggccgagcacgtgctcgagctcagcatggcggccatcgaggtcagtctggctgtcgtttggctcttttgtggacgggaacaagcgcgatggcgttaggtggggctgaagggggaggcgtgtgcgctggagcgaagcgaagggagaagaggagggtccgagctccgaccgatcgagcgccgcccccggtcgctcatccgttccttcctaacgcctcactaacgcaacctccctcttctctcgcacgaacgtgcagatcaacatcgagctccgctcccggctccaaattgcgccctacatcgtcaaagccgaatccgccctcaaccggccccagccctcctctacctcttcatcaagcgccgtcccgctctccgccgctcaggcacgcacaaaagctgccgagcaggctaagcgagaggccgagaagaggacggtcgggacgcggctcggggtcgcacgggcgttggcgagcttgggggccgaggtgtatgagcaggcggcaagggagtttttggctgtcgagggcgagctgggcgagtgggctcggacggtcagtcccttgtcttctttcgcgctttacgccgccttgctcgtcctcctcgactcggtcgctcgccgcgcttgcgctgccctgcttgcgccactccgccccttcaaatgttgattcctccccgccctcaggtgatctccccctccgagctcgccatcctctctgccctcctcgcgcttgccacccttcgccgctcggccctccgctccgaagtccttcagaacgaccgcttccggcgctgggcagacgacgagccgcacgtccgggcgctcgtcgaggcatttgtcgacggcaggtatcggaccgtgctcgaattgctcgagcggcattcggtgcgtttgcggacacgttaacttgctcaaactcagccgggttgaagcttgcggttcggtgctgacttcgctgctggctcaactcaaatagacgcaacacgtcctgatcccgtacctcgccccacaccttgccaacctgaccgcctcgatccgccggctctccctcatccaatacttcacgccctttgcctcggtctctctctcacgcatggcctccgcctttgccctcccgcccgcggagatcgaggccgaggtgctcctgggcggcggaggcggccgaccgggccctccgccaggcttcccccagcagcagcagcagcagcagcagtacccccagcacatgcagcaccaaccgttcccctcccgtagcaggcgagtccgcaagcgaggcaaacgacaggctcccccctccccctgctccaccaaagccgccgccgcgcgaagacgaggccgagggtgagcgaaaaaagtcttcgatgttttcgatccggtcgggccctgtgcgcggaacgtttgtcggcatcggccggccggtcttgctagtaggcgcaagggagagaggggatggagggggtcagctaagggtggttgatggctggcggagtaggctcccttggcagctaggctggccagagagaacacgctcgtcggcaggggaggaatagatggccacccagggactggcttgccgaccctcccttcccgggccaacggcagcagcggcaagcagccctaaggaggcgggtcgggcgagggcaacgaccgaccctctcttggcccccccccagaaacccgcacgctcccctttgaggtgttgctcgctcgagcaccccatacagcgccatcttgctcggcaggcacacctcccgagttgctgtctcgcgagagccggatggatgcgagacctcgtcaagcggcttgttgagcgacgaccgcgcgccactcgagggaagcccggccatccacctccaacaaagaatggcgcgacgcacgctcccgtccttgcaacgtcgtggacgtaaggctggtaggccctctcggcttcggcgcgggctttgcggtctgcggggcgggacattcttgaggggttgttggcggtaggcggtagggttgatggacagacgcgagcacgcgaggagggacaaggtcaggcacgcgcgcaaatgcagatgcgagttggcggggccgggcctaggcgtccgagcgtcgtcgtctgctcgactgacggctgcctccgacgacgactgccagccagcccagcaacgacgatgacgtcgatcacggccaggtgggcgtctcttctgacatcttcagctgctcggctagcaggctgacggatgcccttcccgctcccagcgccctccacccgctccaccaaaacccccagctcgccctctcagccgacctcgctcccgtctcccgcaaggctctcctcctcggctctcaaagcggcggcgacgacgacgacgatgatgatgactcaagcggcgccggcgacgaggggccggacaagggcgcgccgccgacgaggccgttcgcgagggatcgagagggcgagtcggtcttgcaggcgatgctgcttggcttgctcggcccgccgccgccgccgccgccgcttgtcgccgtccatcaggggcaggaggacgacccgatggttgctgcttcactggcagatgccgccgagccagaggtcctcggtccgtcccccgctttcctgccctggccatctgcgcgcactcgcacgcaccgaatcctgaagcctcccttctcacctccgcccctcccaccctcagactttcggctctacgccagtcagccgctcacggctgtccgactcgtgcccctcctggtcgagcaccacatcccgtccgtcctctcccctccccgcgcctttcggctggctcgctgacaggtcccttgccccccttctccccgacgaccgaccgtgaaggaacccatcccacgccgacctgagcaaagccgcccgaaagacgctcaagcaccgcgcgcacgccgcggccgtcacggccgagtcgatcctcttcgacgctgccgcagccgctgcgctcgcgctcgctccttctcgcctgggtggccgccggccgcccgtcgtgcagcacttccatctcgccgctgctgccgccggcctctccccacccccgccgccgacgacaacgacaacgacgcaagccgcccagttgctgccctcgctgctctgcacgtcgcacctccgccaaacagccaactcgcgcatgcgctcacatgggtttccccctccttctccgcccgaacgcgggccggacggtcacctcccttgtgcgcagctcgcaatcgctctcccgccctcaccggcggcgcctcctccccctcccagcccggccgcagcaaccgactcgcgccagcgagcaaagcgcggcaagcgcaagcgtgtcatcaagcgccatcgctcgcatccttctgcgccggcccggaagcccgcggccttcttcatgcccgaccttgcgctcggcgggaaagcccttggctatgcctacggcttctcgctcggccgttcagaatgggccggtgccgagcccgacgcaatcccctatctccgcgatcggctgaggaagggctgggtgaatcggaagaagggcgagagctggtggggctcgcggcgcgacaagggcgggccgacggcaaaagaaacggccaaggctcgacggaaagccgacggcggctactagggccaggccccacgctgcggagagcgatgggatgacatgcgctttgctttggtctgctctcgaggatgagatggactgggcatgggtacaacatgaaagaaaaggaaggagggagacgcgggcgttggctgcttggagacgcacggagcgctacagcaagccctgccgctggaggtcgactgcgaaagcaagcgaagcaaagcgcgcgcgcgtagagcgaaaggagtaaagggtcagcaaacggacgattccgagtccgacggctggcagccaaagacgggggcgaaagcccaaggctgatgcgagagggggagggggggcgtacggtagtcgcgtttactgtaggcgttgccctcggcgtcctcaaactcttccgtgtcgtctgcggcgcgcgcgtcctgcttgccctcgcgcttgagcttatcggcgactgacgggcgggagcagggagaaggtggcaatcttatattggtagccaggaatgtaagtagaagacagttgggcactaggcccgagggtggagagatgctctagtgggtacagaggtttggcgggcaggtcgctatgtgcaggtgaggcccgtgggagagagcgaggaagcaggcaatgccgtgatctagtcgctcaggcgggcgtcaagagagaaagagaggaagaagggcggaggtccagggagctgccgtgcgggcgaccaggaagaagcgcacgaccgttcagatggggccgacgagcgagccgacgaggccgccaacagcgccgcccgaagtggcgaggccgccgacggtcgggccgagtccctggccgagaccagcaacggtgccgccaagggcaacaggggtggcagggccgaggaggccagtgacgaggttgccgacaacgccgcccgagggaccaaggccggcgacagtcgtgccgaggtcggcagtggcgccctcaacagtctcctggaggttgccgagcgttccacgcttgacagggtcgacgaggtcaccgacaagctggccgacgacgccgccgctctgagcgagaccgccaacagtagggccgagcccctgaccgaggccagcgacagtgccgccgagggcgacaggggtggcggggccgagcagaccgccgacgagtccgccaacgaggccgcccgaagggacgatgccggcaacagtcgtgccgagatcggccgtcgcgccctggactgtcgtgtcgaggttgtcgagcgtgccgcgcttgacgggcccgacgaggttgccaacaaggccgccaacagcgccgcccgaggtagcgaggtcaccgaccgtcgggccgagtccgtcaccgagaccctcgacggtcgtgccaagagcggcgggcgtgccaacaccgagcaggccggtcacgaggttgccgacaaggccacccgaggcggggatgccggtgacagtgtcgccgaggttagcggtcgcgccctcgacggtcgtctggaggttgccgagcgtgccgcgctgaggagggagaggatgggttgatgtcagctcgaggttgagagaaggcgtcgggaaaagaggtcagacggaccttgaccgggccgacgagcgagccgacgaggccaccgacggcgcctcccgaagtggcgaggccgccgacggtcgggccgagtccctggccgagaccagcaacggtgccgccaagggcaacaggggtggcagggccgaggaggccagtgacgaggttgccgacaacgccgcccgagggcccgagtccagcgacggtcgtgccgaggtcggcagtggcgccctcaacagtctcctggaggttgccgagcgttccgcgctgcagagggaagaagaagaatcggaggtcagcgatagtacggagagaagagaaagggaggtgatggaggacgcacgcggacaggggcagccgaggcgagcgaggcgagagccaggagggcgacagcagaggaggaggagcgcatggtgatggagtgtggtgtgtgagggagagaggaaggcgggtgaagaggtggacttgggtgtgaaggaaggcggttgggtgtgagtgtgggtgtgggtgatgaggaaaggaaagaaggaagacgatcagctcacctccggtcgacctttaaagacctcgccctcgccggccgctccagctagcagcgccttgttgccacccggaccaagaccggcgtcagcggggaagaggggcaggcggcggcgggcggcctttgctcccttgttctcgctagcaagatggaaaaaggagggtggagcggatccaaggaggcgtggttcggctgggctggtggcacagctcggagagaggggcagacgccagcaggtttcggcttgggtcgagatggcgacaaggcaaaaggcgtggccggagcgcagcgaatggcggtgaaggagccgaaattgcgggcggccggccgcggtcgcaacgtgagcagggtggagacccagcagccggctggtccagccgtctgggtcagagctagagctaccgaggcgtgggggggggctggccgctaggctctggctgggcgtccgagggccgagggccgacagagcctacggctggcagggcagggcacattgcggggccggacaataagggcggacccgttcggctgggtcagcgtctgccatggggcatggcggttcgtggcgtcggctgcggtggaaacgtggtgagcttggagcgagctgccaaaccgccggcggtgccgtcggccgccgccgccgctgaaaggagaaagggcgcccgcaccaacgagggagaccagcagcaaacgaggccgagcggcagcagcagcagagcgtggccgagtacgagcaggggtgctccaccagcatcccgctagctcggccaggtggggtcggaggagctgcaccggggcgacggaggccggccagcaggggcagcagcagcagcagcagcagcgtcaatggcgatgagcctagcgctcgcgcccgcctcggtcggacgacgcgacgcgcctgccttcgtcgaagctgctcgagacgagccgtcagctggagcaggccagcagaccagtcagctcgttcgtcctgcgttcgtcttgtcctcgagactggctcatggccgtccgggggcagggccagcacgggcggagcaggtcgatcttggcgactcggctgaggcgttgctcctctgcctcctttcgaccatgaccctcctcgctcgctcgcggggcgactcgactcgatatgacagggctggccttcatcctgtgtacgcaattcgacccccccccctccttcacgaaaaccggggacccagaacctctagaggtgttttcgtcatcgacatgacctttcacgtgtaggaacgcgcgcgtacatggcccgaaaagagagagagagagagagaagctataataagtcagaagagagcccgcgtgctatggccaaggtgagagcaggttgaggatccagcagacgaggagcatcccgccgagcttgaggccgttgttgtcgcgtgcgtcctcaagccagctaacagcagcggatgaaggcgaggcggcgactgccccagtcggcgggacggcaaaggacgtcctgcgcatccactctggccaggccgacggtcgacgggccggcgcgctcggtcggacatccccatcgtcgtcgtcgtccgacccggccggcttgttggccgtctcgagcagcgggatcgcctcggccttggtcgcgcccgccaccgccgccggtccggcgtcgccggccgccgtcgctggcgtcggcaggcctccggcggccggcttctttgcctttccaacgaggaaggtcgtaatctggccggttgtctgcgaggccttctgcgagacgaagatgaagataatcgacgtgaggacgacgttgagcggccgccatttcgtcccagggatgacgaggacgatgcccttcgtgtcgccgccgagccagaggtgaaactggaggatgaacgtctcgagcgagatttggccgacaaacatccagagccggctgttgacgcttcggaggaacggatggctgtttcggaggacgacaaacgcgaggacgggtacaaaggagacgaccgggtggtaggcattgtagaccaatttcgtcggctgccggagctcaaaccagaaaaaccagccgaggccagcgagcgagaggccgacggcggctttgatggcttggctgaaccaaggccggtcggggatgccgagctcctttgcgcggatatgggcgtacgcggtgagcatgccgagccagacaacaaagaggtcgaggttgacgcggaaggcccactcggccggcgaccagcggatgttggcgaccgtcgcgaggaagccaaagacagcctcgagcaggcgcggcgtcatcataaaacatgagacggcgccggcgcagaggacgagcttcgggaggagaaagtagggcgacgtgttgtacgaggccccgaggcgcatcgtcccgtagatgatgaggtaccagaacgagacgagcggctggcgggcgggcgaacacaaggagggcagtcagcgcgaagggactgcgcccgagaaagctggcaggccgcgcgacagaccgaaaagtagtaggaaatgtagtcggcctgcatcgtgtaggcgagcacgaccggcaggaggttgagccggaccatgaccattgcgatccggtcgatgccatagtcggccttcttgaagtagaaggtaaagtggccgtagccggtcatgaagaggtaggcggcgacgaggacacggatcgggttgtagatgccggagactttggaggcgccgaggtagtggtagatgaggatgacgactggcggggggggagagggaggggggtcagcctgtgtcactagagcgagcgacagagggtagggggcaggcgcaccctgcatccagcccttccactcatccgtctgctcgcggttcaagaagccgaggtccttgccgccctcgctcctttccatcgtcgcgagcccgccgacgacaagggcgaggcagccgaggccaaacgaccaggcgtcatacgacttgttctccttgagccagatgccggtccggtctagcggcgcgtggcggacggcaggaggggggcgcggcgcgggttaaagaaatcagcgtcggttggggccgccgagaacttcgttggcgggaacagagacgcacctgagaggtaggtcaggccaatacagaggccaaagacggtcagggcgagcacctttcggtcatcgcgcggaaacagcttcgcgagcttcggccaagccgcaagcctcctctcaaacagcttgccgaccggcgcccaaaggacgaccaacgcaagcacaacggcctggacggcgctttggatccccgggtagcgcctacagcacgtcttgtccattgggaagcccttgggtagggcgtcgttgcagcggaggttgagcagcagctgggccttgacccggttaagcttgagcgagtagtgcaagccgtcgatcgtttgtgacgggtcgagaagggcgttgaagctcgtcggaaggtggaccggcggcgcacgaggcttcgcgagggcgccggcggccgctgctgctgctgctttcggcgcgaagaggagcgaggaggtcgcgctgccgctcgagggcctgagccgggcgagcaggtccgaattcatcgcgtcgatcgaagacggaaggagcgtcgcgcgcctttcggccgagagtttctcagggacgacgacgggtacgggcaggacgatgacctcgtccgccaggaccctcccgccgctctcgctgctcgaggccttcgcaatctgcgcaaagacgccgtcgatccgggattcccagcgggcgagcccacccgaggtcgggtcgcggaggtaccagaggccggagccgaggacgagaagcgcagggtgagtcggggtcgtgccgtctgtctttgggaggtagggatgcgagaggatcgtgttgaggtgggtcgagttgaggtacctgcgcgaaggggaggggaggggggactactgctgctgccggtgctgctgctactcgtgccgccctcgcccatcgcctcgccaccggccggctcgtcatagacgtcctcgcacgccgtcggcacgacgggcgacgtcagcgtgtcaaagtcccagccgcgccgccagcgctcgagcgcgcccgcgagctcaagcgccatcgcgtcgtccttggcccaggacgcccagcgtaggccaccgctaccttccccgtcgtcgttgtcgttggcgccggcgccggtggcagggggggcgtcgggccgcgcgcgacgcttaccttcgccgagctcgacgacctcgcgtgtgatcgcgaggatcaggcagagccaggcaaagctcccactctgccactttgcctctgccagacaggccggctcggcctggcctggcctgacgaacaggacggcgagcgcgtccgcgagcgtcttgtcgttcgagggcaaggccacgagcgcttgggcccaggcgacggcgtcgggcgcgagccagatggggtcggctgcgggtagggggaagtcggcgagctcgagcgaggagatgaggcgcgggcagccagtctcgagcgaggcgaccgtgtcgagcacaaagacgatccaggccgtcctgccgagggaagggagggcgagggcgggccgccgtcagtcaagcgagcgaataagagcaaggagagagagagatgggaaggacgcaccgccgcgccgattcggctttgatccacctccgccactccccttccacactctcctcctgccaaccaaacctcggtcgacgccgcacgtgctcattggccgggtcaaagacgccaatctggcgagcgatcgcaatcatcgtcccgagttgcatgtgggcgagcatcctttgctcttggctgtcggacaggaaggacggcgcagagtagaggaggagcgcttggaggagaccgacgttgtagtctgtaaagaggacgcctttgctccgcgtgaagctctgcgctcggcggtcgtcaaagggaggagatatcagcgagagagtcggaggggaggtgggggggggggcgaggtcgttgggaggaaggaaacgcacccggacgagcatgtcggacttttccgaccggacgaccgaccggagcccgtcccagctgccagcctcgtcctcgtcttcaacctccgggacggggacgtcctctcgcctcttgccgaccggcccgaccggcctccgatccctctgcggtttcccacacgaggcgatcgcgaacccaacgcagccggggacctgcgagaggctgaaggtcgggacgtgcaagaacggcaggtgggggatcacctgagtgatggtccgttttgcgacgcgcgaaaggacgcggagcggagggagctgccaatgctggacggcatagcagcagccgaacttttctgggtcgatgtagaagggtgaggagggggagagggtgtaggtctcgcggccggatcgggcgagccggagcgtgccttcgacgtgaaggagcttttgctccgggacgagccaggcaccagaggaggagccggcggcggcagcggccgtcgaggccgaggctgggtgaggggcgagctggaaagcttgatgctgttgctggtgaggggggtgccgaccctcgatgagcctcagctcctcgcgctccattgcgcgcagcgcagcgctcagcccatcgtcgtccccgttgtcgcctacgatgccgtacatcccgctgccgctgctaccgtcgttgttgcgcgggggggcgaccaggccgagcccgcctcttgccgaaccgtcatcccctgccgttgccgccgccgccgccggcgtcgacagaagactcaactcggaccccgcaccaccaccaccgccgccggcgctgctgctgcccgcgagcagcccgcccagcccaagcccgaaaggcgacagcccgctgatgctgctcgcgccgctcccttcgccgccgagcgagggcgatggcagtccaagcggcaagagcgagtttggcgagaggaggccgtcaaagaggaagcctgcctccgggtggttttccgtcccgtcggcggctcctagcggttgggtggcgctgttgggcgagagcaagagtggggcgttatgcgatgccgatgggctcgcggcgctgttgccgagcgagagcgaccctgggctcccagctccgcctccgccgctgctaaagttgaattggctgaggaactgccccggggagaaggcgagggacgagctgcttgcgtttgccggcgaaggaggggggaagtagccccctactcctccggtgccggaagtagagccggggagggcagaggggtggaagaaggcggagggagagaagggtgggaagaaagttgaaggtgaggggagaggggggagagttgttgggccgccgccgccggtggacggtggctgctgctgctgctgctgctgcttgtgtggaagaggcgccgggttgacagactcgccctctcttgctgcccctgcgtccgaaggctgccagcccgctctcggcggtacgagccgcccaccgccaccggcgctgccatcgagcgccgggtcgagcgggaacggctgctgttcctgctgctgcggttggtgcggtactggaccgaacgccgtccgctgaggctggtggtgtgtgtgcgggtggtagacgccatgctgcgcctgcgacgctccttcgacctgctgctgctgccccggcggatgagggtgctcatgccccggcggatgggggtagccatacccgggtaggggacggacctgatgctggccgccggtcccgaggttggggtgctgcggggcgtgctgatcgaatccagagcaaggacaccgtcagcgcctttgcccttcacacaagggaacgagcgagagcccgaatgcgcaagcggctaaacggaccgtatgcgagtcgaccaagcccggcatcaagaactggcccttgctcagccggacgacctcgcgctcggcgacctgcgaccggcgtgaggcgagcacgcgagcgacgctcgcggctgaaacgtctggctcgagccactcgatcctacaagcgtgcggcggtcgacgacgacgaccccgagggcaggcgggcggagtcagttcaagcgagcgagaggcggaggtgaggggggttagggagggggacggacgagccctcgggcgagacgctgacgagcgctgagcgttggaagcgtagcgcatgagggctcggcgcgtcgatgagcgtgccgtgccagacgcggctctgcggggcagtcagctccctgaggcagcgagtgaggagagcggaagggagggaactgaccattctgggtaggtgcgggtggggaggtaggtgcgagtgggcgttgggctggaggaggcgagattgtcgatagcagcatgcagcaggccgggcgagacgaagcgtccgctccgccggagaagagtcggcactcctccgacgaccggacgacaatcccagcacttagcgtccccctccgatatgtgtattcaacgggcgattccatatctatggcctccggccagctcctccgaggctcagccctttgacaacccgctcgaccgcccggagcgtcacgctcagcctcttctcgcgcttcaccaccccttcctccctcgtctccctcttcccctctgcctccggggcgcgcacatcgggccgaacaagctcgcgcatcctcgcccctcctagcagcgtcgcattcgcgcaccgcccaccttcgccctgccggagcgagccaaagtcgtccgtggttgaatggaggatctcgtgtcgccagtcggcgtatgccgccccggtcaggaggaggagcgagcgcggttcgaggacgagcatgagcggctgcgcgctggcttcagcctccccttttgccggcgctgaattcgagacgtcgtcgtcggacaccggcaaggtagctggtggtgggggtgggtgtggtgcgtcggccattgaagtaggattgagcgccggcgcaggcgggtgcaagagcaaaatgaccggccacaagagcgagacggtcgccgtcgctggaaagtaggccgggccgtctgcttagtcgacagggttgccgagaaggcaagtcagcgtacgcgcattcgcctgcctgcgaagcggtgagggggaagggggaagaaccgaccagtatgcgagtcgatcccctggcccggtagatacctgctccctcaaaagaccgcgagtcagccctcctcgcgttgtcgctcttctcgagaaaaagggatgggagaaggggagggggacgcaactcgttgacgagcacctggttcggctcgcccggcttcgactcgacgaacgcgcccgtgtcggagacgcgctggacgaggtctgggctaaatgggcgtgcgcgcgcggaagccgtgggacgggatgcggagggggtcatcagcaggtagactccggcaggagcatggaccccgcatgaggaagggcagctgaaattcaaagggaggaaggagccgacgaacaaagagttgaagaaggccggcagcggttcggcgatcagcgcgttgctctttgtcaatgcgccgcctgggcaggagcatgcggcacgtcagcctcagtttgttcggagtggacgttaaggatcggagcgttaccccagtactgcaatctggcgagatgagggaagaaatcaagtcaggatctggaccaagcgaaggagggagggacgtggaggtgctgctgcatgggtcgcctgcgcgccgccgagagccaacgacgcatgacgacccaagcggtcctctgctcgacctgcatcagctgggataatgaagaaggcccgacctccggccggtcggcaccgtctgccacttaggcagcgggctctcgccgatctctgccgaacgaagtgggggggttgtcagcccgttagtccaggtgtgctcacccctgacgtggcgtaggggcaggtggaccgactcttgacgagatggtcctcctcggcttccgagatgaagtcatggatgtagaagaggccttcggccggaccggggacacggaaagctgcgaagcgcgggtcttgcatcgtgctgctgctgctgctgtgcgatggcgaaggaaagagtaggaggaggaggaggtcgtcgtcgtcgtcgtctcgtcggaggatcgtccgctggctgccgacctcgaccccgcttgcctcctcctcgttccttcttacgctttatcaaccatgtctgacagagtaagcacacacacacttgaattctccttcctgcccgcccactgacccttttcacccctccccctgcagggccgaggcaactcaacgcgcggccgcggcggcccctccgcgcgcggcggcggccgaggcggcggtgcttcaggcggcggcggcgccggcgagaagccaaagcgcgaggcgattcttgatctgggcaagtatgtcgaccagaagatccgggtcaagtttacgggcggacgggagggtgagtttcatgttcgagcgcaagggggggcgagggggcgaggccgtttcgggccgaaccccccccccctcgctctgtcggttcttctcctgcgctctctcaactgacagttcccgacccgtccaccccccgtagcggatctacaaggagcgcaaggcgctgacggcctcgctcgccgacatgtcgtcggctgtcaacaagctcgacggcgtcctcctcggcgtcgccctcgtcatctgcctcttcatctttctcctcatcttcaacaagacgtcgacggtcgagtcgctcgttcccgtctcaacgtttgtcctcggcttctcgttcatcttcagcaacagcgcaaagacgctgtttgagtctcttatcttcatttttgcgacgcatcgtgaggcgcccttgtcttgctcttatgatcgtgggccttttcggggctgacacgtccgcggccttccaccagctttcgacgtcggcgacctcgtcctcatcgactcggacttcctctttgtcaaggagtttggcctcgtctcgacgacgttccgacgctgggacgcccaggagattatcgcgcccaacgccctgctcgcgacgaccaaactcatccacaacatccgccgctcgcgggcgatgtgggaggtctgctcgatcaacattgcctacgagacaccgctcgaggtcatcgaggaaatcaacgtccgcgtcaagcagtacctgctcgacaacaatcgcgagtgggcaggcggccaccaggtcaacatcaactcgatcagccaaatggtgcgttaccttcgccttccttcttgtcaaaagcgactgctgacctccccccccccctcctcggtccttagaatgtcatcaacgtcgacattgcgatcgagcacaagtccaactggcaggactggggtgcaaagtggatgcgccggacgctctttctcaagcacctcaagacgatccttcactcgctcgaggtaacgtacagcctgccggtccagccgatcgtgctcccggccgggtcggagaacctccagcagttcgcttcgagtgcgtggcctccctctctctctctcaatggctggctaccttgggtttttgtgtctgaccagccgggatcgccgcagacctcttccctggccgcgacgactcgttcggcaacgccggcgggagcaacggcacgcttagcggctcgccctaccggaatctcgcccctccatctgccggcggcagcggcatgggaggcgctcggccgagcctgacggtccagacggccggctttggaggcatcgcccgctgattggcgctcgtgctggccggctctcttcttcttcttctcctccttcctttcactccctgtcacaccctctcacctgcatctgtcgtctgcagccctcggcgctcagttcgaggctttacgcgccaccctcccctattcatctcccccctagacatctctttttctctttccttagacacgccgccgcaccctcatcgacggcccggcctggcccggctccttcccttccatgtccatctcctcgcatggccagacgccgctcgcttcgccctgccctggtggcagccgaggctcgctgtatctggaccccaccccatctcttccgttccagtgcacgataattgcatcctgctccccttcgctttgtttctcgatcgccgccgcagcacccgtctctacttgccctcgccttcatttgctcgcgtcgcactctgtcgcgccccttcttgctcagcactactttgcatctccgcttagcgacccgaagctggcagcaggtgcgatcgacgatcgaaagcgtcattctaagccctcgtggcgtccgcccggacgcgccctgtgtctagctccaagaagaagagagagcgagagacaccagcagccctctcactcgacgtcctccagaaaaatcctgacctcgccccccctccccttggcccacctccgcatgagctgcctcccgctcctcgtcggctggctaaacgccacgcccccctcgccctgccctacgccgacgggcacgccaaagattgcgtgtgtgcacgctgtggagagaaggtgcgaggcgagggagagcgagcggaagagggacgaggtctggatgcggtggacgccgaggagcgttggaagaggggtgggactggcgtcgggcggggaggaaggtcaggctgaaggtaggagggagcaaaggagaggaagaagacgtactcgcagaagacccccccgtcgtcggcggcggcggcggcgccggcggcatcgccgtcgacacctcccgtcgcggcgcccctcgccggctcgacgcacacgagccctccgccgccgccgtcctcccctcgtctcacccgacctgccccgccctcgccctcatttgtcgcagcagtagcagtagcagcggccgcggcccgctgtcggacctcgtcctgcgagaggacgcgcagcgcgctcgtgatccgctggacaacgcaggcggcaatgatgtactcgcgcgctcctcccggcgtgttgccgccgccgctggtgccgctattgctgctgctggccgttgctggaccccgtttggaagtcgataacgtgtcggtcttcggcgctggcgtaggaggggccgaggccgagaggaggagaaacgtctgcgtctttgctagcacgcctggcgggaggttgggcgctgaaaggtgggcgttgagcagcgcgtggagctctttgatctgcgtgcgcaagtgaatagacgtggagtccgtcagattcggtgcggccgtgagagaggagggggaggcagctcaggttgctcaggccgctcaggcaagggagcggggcgcagccgtcccttgactcacacctgccgcccgcgaatttcagtaaagtgcctcctcatccgaacaccctcctcaaatagttggatacaggagggtccagctgggtcctctggggccaagaatggtttcatgaaggcttctgaaggcctcatgaaaatgtgcaaatctcagcggacctcaggagggtcgctgtggctcacagccgccagcgggcctcagaagggggctcaagagccggcttgagctgacgcgctgcgcgcgtgagagcatgtaccggatacttgtactacagacgaccatcgacgacttctactatgcccatctctgttcctgacgcacgtgacgcgaatgcgtactcgtctgtcggctggcccttgctgcgccgcgcgcggccgccctccgcctcccgcctgccaccacctcgcccctatctctcgctcgcttttctcgccaacttcgcctcgcagctcgatcccgttgacgttcccggaaagccgctcactctcgctcgtccgtcctgcaagaacggtgccgattcgccctccccttcgttcgcgccggccgaaccctaccggccggcgagctcacctccagctcacgcgcctcgcccggtcctccatcggccgctgacagtcgaccactcatttggcccacctcgactgatctcgctctggatttggacgcctccgctctcctgctgaccgctccttgtccgctgatcgacttgcggcagcgcgacagcgggtcccttcggtgcgaccggcgagcggacgcgcgcctgccctcccgccctgctcttccgctctccctccttcgtccgagtgcgcagaactcatagcaagattcatagcagactcatagcagaactcatactatgagtcataccatgagttctgctatgacttgtcgtctgagtgcccgcgacgggtggttaagggcggaagttgacgggtccgcccgccccaagcttgaccgctcgactctgaccagccctgcttcactgccacgagcgtccgcctttcgtcttgctcgcatgccatgttgcctatcagcatgtgttgctcgaatggcctttgtcacgaggtctagagtcgagcgcggtgcccggctgcgtcaagcgacgcgtcgagcacctctacacgacctttgtccccgcggcagcccgcctcgcaaggcacgcctgcccgcccgcctggccttggaggcaggaggaaaggcgggagtgcagctgacctccgacgaccatcgtcctctgccacgtcttacctctacgatgctccagctgcggccccctgctcgcctcgtcgtcatcctgcacacggcgctcccccggcctgggtgcttcgattggtttgctcgtcctcgcccgtaccccaggctgagagcatgggattccctccggtcgccgccggtggcaacgtcagtcgctcggctgggccctcctcggcggacaaggacgacaacgacaacgacaacgacaacgacaacgacaacgacaacgacaaccaacgacggcgatgacccggcgtcaaccgccttgcagaacctccctgccggcaccccttacgacggccgctcggttgcgtcattcgtcgccctgcccgtcaccttaaaaccgacagtcttctcactcgcctagcctagccagggcgcccgtccacacccgcttcgagatcgagtcgagcgaggccgaggacgacgtcaactcgcggctcagtctgccgaaccgggaggacggctcgatcaaggaggacggcgacgacgacctcgacctcgacgccgtgctcaaccgcctggccgagacggagggctttcatcacgctctcaagtagcgcatgacgcttgcaggccgctccggcaagctcgaggctcttcagcatctcgacggcatccactccactctccgggagaccaacgctgtcccaggacgtcgtctggacggtcttcgacccagttgtcgaccaagtccagtcggcgacttggggcgctcgcgctgattcggaccagcaggcgctccttcggcgggtcgggcgcaattttcggcccccctgacgagcaggccgtccgctttatcaatcgcctcctcagcttgatcgtgtacatcctactcgtcgcgtactctatgatgcccattgctgcccctttgcctgagtgatgacgcggtctcgatcagcggggaattggagtgtcggcgggcgacaggtgcgcgcgcgctgcggagcgtatgagtcggcagggcaggggtctgagttggcagagtagaggtataggtcgcgcgggcagagagcgcgagcgacaagtgcgcaggcaagtgtgagtcggcggaaaccaggcgcgagtacgcgggcggcaggtatgagtcaagggacggctgcgccccgctcccttgcctgagcggcctgagcaacctgagctgtcccccttgagactcaaccggcaggcagctgcatgcaacccccgccctacgctcagccatcctcgtcaacctccagcctccagccttcctccagctccatattggtccctacccctgctcctgccgccgccgccgccgtcgacacggacgagctcgtcctgatgccggccccgacctacgccggcggcgccgaggcgtcgacgccggccctgccgagcggcgccctccctccgcttcctcagctctcggccggttaccagcagcactcggcggctgcggcgtacctgcccagcctctccggccagccttatgtcggcgacgagggaccttcttacggcctagcgaccggcagcgtcggtgatggtggcggcccgggcagccagcaggcaccgttccaccggctccctccgctgcggcccgagtacgacaacggcagcggcggcgtcaacggaggctacggcctacctgggcccgggccgtcgtccttcgcagcagcgcaggcgaacgtcgactacgcgcatccggcccagcagccatcagcatctgatggaacggcaaaccacaagcgccgagcgtcctccatctcgctcccggccgctgctgcgaccggcgtcgacccgagcagcgcagacggttacgaaggcattggaggcgacgacaacggcaagcgcgtcaagacgccccgggcgtgcgatcgctgtcggggcaagaagacgcggtgcgacttgattggcgggagcgagccgctcatctgcaagttctgtaagaaggtgcgtgtcctgccgatgagaaggaggagacgggcttcgcggtaaggagggagagctgaactgcctttcccgcattctgctcgcagaatggactcgactgcaccttcttcctgcccatcaccgagacgcgcttcaagaagcgcaggacggggtcgacgagcgcctcgcacgacgacggcgctgccgagcgcaaggcggtgacgaccgcggtccccacgccggtgatcaagtcggagcagacgaccggtggcgccgctagcagcagcgccagcgcagggcctcccgcaccgcctcgcgtgagccagcagctagcgctcagccagccgccgccgcccaacaactacttcaacttcttcaagacgccgcctgccgcgccggagcctgtatcgcagacgctcggcccgccacacaccatcttccaccaatcaaaggcgatctcgccgcgcgtcgcggccgctaagcccgcagcgcccaagccgtcgcccgtccagtcgcagcaaagcggctcgggcacgggctccgccggccaaacgtcgtcgtccgcggccgaccggacgcacgaccggcaagcgcgcatccacgggccgacgagcatcccgttcctcatccattcgagcgcggccatccctccttcgaccttctcgcagtatgacctgaagcaccacacgacgtgggagatctcggccggcggcgacggtgtcgtcaaagtgctcgcgccgccctgtccacccccgagcgacggcgggcccggcgaggaagtcggggccgagatgctcgagcggctcgtcaaccactttttcgaagacatctcgccgaccttcccggtcgtcacgcgccacgagtttctcagcctcgagaacccctcgccgctcctgctctactcgatctgcgccgtcgcctcgacccggcggtcgatcccgcgcggcgtcttctcgtcgcttcgggccatcatcaacggcatcatccgcgcgaacgacgtcctgtccgacacgtcgctcgtcaacgtccagtcgctgctgatcctcgctctcgtcggcgacttgcatgtcagcgtcggcgccggtggcgcggtcggagccgcgagcgtccggctcggcgttgccatccggatggtgcgtcgtccttgggcgtcgctcccttatttcgtcaccttggcactgacaactcgctccgcacacccttaggctcaggatctcgggctgcaccgggacgagattaagtcgacggtcgaaatgtcggagcacgaccggctcgaggagcgcgctttcctcgagctcaaacgccgcgtctgggccggctgcgtcatcatggaccgctggtatgcggccagtcttggcactccgatgctgatcgacctgctcgattgtgatgtgcgtgcgctacccttgcgcgctgatcggacgcaagccgctgacccgtccctggtgcctttcctttcaggtcctgctgcccgacccttgcgaggtcccgctgccggcccgcctgagcgatccgtcgtgccagggtcagccctacgcatttgcgtcggagcttctcaagctgtcgatccttctcggccgcgttaccaaggtcacttctctttcgtcttccttttcagccagatgaagctgatcaccccctccacccctcctttttgcctgctagacgatctacgggccgaccggcctgttacatgccaacgaccagcagctcgactccctactgacggacctcaagagctggaagcagtgcctcccgccgccgctgcagtttaccggaccgacggcgagcgggcccgcaggcatgctccacatcctctatggcgctatcatcttcctcttctggcgcgtcttcatgcgtgcgtctccttccagctggcaagccccctcgtcaggctctcatcgactgacgctagtcgtgcgcccccccccccccccccctttttttttctttttgggttaggcagtggtttgggggaagagggggcgaaaggagatgacgcgtctctgggcagggatgagtgaggaagccgacgacgatgagggaggagagggccacaagtggtgcgagccagagcgaagctatccaccctccaaggggtcgagcggtgccggcggccgacgacagcagcagtggcggagcggcgagcatgcgccgcgcccctcctccgtccatcctagacggggccctgacaagccaagccatcagcggcctcgctggccgtttgagccccgcgcctctccgagcgccttctcgcccggtcctttcgtccgtgactctcttgatacctctcagcttcactcttgcctgtacgacagccaggtcgagcgtccgtcggcttgggcccgtacgccagaacccagaccgaccgggttcgtcgccgcccgcccgctgaacatgctcccatcgcaaagccaaaaagagaacagagtagacgcaccgtattccccctgacgtagcactccttcatcttccaaaagcgctcgccgtcggccgccgtctggaagacctcgcgcaggacgaggttcataaagttgtcgcacgcggccagatggccgttgaacgtctcgccgtttttgagttcgacgagctgcgggcgcagttggggcgaggggaggccgagagggcgttgagggtgtggaggcgagcagtgagccgacagacagacgacgagtaggcgaggtcaacgatgagcgagagagagagagagaggagcagacaatcagcctctccttcctcttcaaatacgcccgcggagcgacgaatacgcaccatcggcttgttctgcgctgcattgagcagcgtgagcggaagctgtcgggcaagcaggcggaggggtcagctgaggcttcgaaggacggacggagggacgagagatcgctgcgagagtcgagtcgaccgcgcgcgcgcgccggagagcaagaaggcggcgggcgggtcgctccgctggctagacgctatgctgctctcgcagactctgacaagctgcagggcaactgaatgcgaggcaggactgaccatagccggggaagaaagagagaaggcgagggggagagttggagaggtagttggtcgtggcgagctgtcgcctgtcgtcgtcgtcgtcgagctcgttcgcagtcggcccgcgcgcgcgagcccaggcgcggagtttgaacgcatggggcggcccgcctggcgacgacaggcagcagctcgtcccgtcgactactggtacagtctaacacacatccgacgcatctgctcaaagaacgaacaagtcgctgctcgctcgtctccaatctcgtcagtcccgctcgtcaaagttcccggactcttacgcgttctcgcggccaagtcgttcgatcgtcgcgccattcctccgcacctgtcgtccgcctgccctcgcacctgactcggctcgcaacaaggcctgtgcagaccatgccctgctatgactgtctggcctggtgcacaagcagagagacgaatgacgccggctgactctttgaaatctctcgctttgcttcgttgtcccgctcatcgttatccttgcctcgccgctggatgctcgatctccttccgttcgccctcttcctcttcgtgcgaagtagcccgcccgctgcctagcatgccccgcctctcgctcccttcgatcgcccttcgcgcctcgacttcaacctcctcggcgccccttcggctcttcacgccagcctccctcagcgccggcgccgccgggccgtccctcctccggcagcctcgctccctcttcctctccgcccggccatcaaccctcctcccctctttctcctccgcactcgtcgccccgctcgcatcccgcgctttctcccttacgatcccgctcctcggagcgcgcgggaccgaataccagccgtcgcaggtgaagcggaaaaggcggcacggcttcctccagcggctcaagtgggtgtcgggccgcaagattctcggccagaggcggaacaagggccgcaagttcttgtcgcattaggcgagggaaagggaggggggcctcatgatggttttggcttgacggctctgcggaggaggaggagagggaggaggtgcgctagagcaggcattgcccgaagctgacggctgactgtcgtccactgaccgcctctcgccgaccgaaggccgacgaccggccgacctccctgctcccccctcctgtctgcgggctcaggggctaggcagtcagttccggcgctgcgcccctcgtcctgtcgcttcacccgctggctggccgagtcggtcgctcgcgagcattcaaaagaagacggcgggccgcgggatgcgcaaaacggctcgggtcacatcccattcgggcttgctcggcgagagcttgcttgggccgcgctgggcaatggcggaggacagctggcgagtcgagggagacgcaagagagaaagagggtgcaagcccgtagactttgacgcttgaaagggcctcgcctctacgccggacgtcgtcggagagtatgcagagagatcaggggccttcaccgagcttgccttgggagcgcttctacacgatgagcatgagcatgtggcatagcatgggttgtcgaccatgatactggtgcggccctcacttcactggcctccccacccccctcctccctgatacgtccccggcggtgcgtaccccgcccgatctttcgccaactcgccgagctcgccccgacaagacctccctttcccaccctcaccccaccgacacgacccccaccatgtcaaagcgggtacacgagctcaaaggagctgaggactaccagcggtggtcgctcacgcgcaaggcttacatgcagagagaggggctctggctctactgtctccccgccccgctgccctcctcgccctcgccctacctcacctccgagcccaacgtcgagaaggaccccaagggctggtaagagtggcagctcaacgtccaaaaggccgtcggtaagacccagctcacgctctcccgcaacatcaccctgacggccgcccacgcggaccacccggtgcacctgctcacccacctgaagacgctcttcgccggcagctcgatgtcggacgccctcacgctccacgactgctactcgtcgctccggtgcgtcgctctgaccgacgtggccgagctccggtcccatcttgccggcctaggcgatgtggtgtcggacgacaagcaggcgctctcggtcgtccagggcctgaaggacggccccgacgacgacctccggcggcgcctcgtcgatctgccccacctcgagcccgaccgcttctcgtacgcggtcgtcgaacggatgctcctggcccggtcgcgcaaggaggaggccgagcgggtcgatcaagccctagcggcgcgcatgaccggcatgcgcatcaagccccagggtcatggacaaagccgacagcagcagcatcagcgcacgtccggtcaacaaggagggacgtcgctcggcggttccggtcggtgctttaacggcctgcagtccggccacttcaaggtcaattgtcagaaccccacctccgccactattcccgtcggacacgagacgaaggaggcttaccgaggccgagcggcggctcggcaggaagctcgtggaagggtgcgggcgagcgcggcgattgtagctggcgacgtggattcatccgattccgagcatcacgtcgtcacttctgctacaagctcgttgggggagaggcggccctgcgcgctacaagcgaggttgtcatggcggcagtcgccgaaggaacgacgtacatcgactctggccgctcgcggtcaatgttcggcggggccagctggttcgacgccgcatcctacaagcaggacaagcgcaagatcttcctgggcgacggccggtacattgagtcagtcggcagcggcacggtcgagatgcaggccggatcgcacctggttgttttaaaagactgcttgcacgtccccagcctggcaggcaaccttctctcggtcgcccatcttgtggcctcgggcctgcgctgcgccttcgacgcacgcgggtgcgtcgtcgagcgggctgggcacattgttgccgtagtgcccgcatggtcgtccatgtacgcctgggacgttcgcccaggtgcggtcgtgtcagccgttgctgtcagcgcgtcagccattgacgaggagcttgcgcaccggcggctcggccacgtcggtatcgatcgagtccgtcagatggcggcccaggttgacggcttcgagctgacgccgaggagatgtcagcatgcgacgcctgcgtcgagggcaaaatgacgcgacgcagcttcacggttgcgtcggtcgctcgggggcgagccgaccaggcgatgtggtctcagcggacctctttggccccttgccggcgacggcaagcggccatcaatatggccttgtcatcattgacgacgcctctgccctcatcaagctttaccatctcaaaaagaagagtgaggctctgccctgcttcgagcgttttgtggccgagacggatgtggcaggtcatcgtgtccgggtcctgcgttcggacaacggtggcgagtttgtcagcatggcgttcgactcgtacttggccgacaaaggcatcgagcgggccctcacctcgccgcatacgcctgagcaaaatggttctgccgagcgtgtcgtacggacgatcaaggaaggcatgcgaacggcgcttctccgggctgggctcggtcggtcgttctggggcagggccgctcggtcgttcgtctatgctcggaaccgatcggtcgtcaaaggtcgcgttcccctggaggcctggacggggcagaaagcgagcgtcagcttcctgcgggtctggggttgcctcgcctgggttcactgccggcagctgaccggccgagttccctctcgccgaaggctgtccgcggcatcttcgttggccaaggcggagacgagggcggcgcggtctcgtcctggtgcgtgtgggtgccttcccaaggcagggtcgtgcggtcggccacggtcgcgttcgatgagggccggttttggtccacggtcgacggagagggcggcgacgccctaacctgggacgacctgaacaaagatgctaacaagctggacatcagccaggcaccggagggcgagcgggacgaggaggacgacgcaccagacgacaagagcctgtgcgggcattacgacggcgtcccgaaggtaggcgcacaaggaaatggggccgacgagcagaacggccaggacaccccgtatcgagctgccgagccaggaagagacgagtcagctcctgtggttgtgcaagagggaccggagcctgtgctggcgccggccgggcacgtaccggggcctccgcccgccccccgccccaagctcaaactcacccagcgcaggcgccgcccggtccgcaccgatgtcatagccgtctccgtccctatgcccccaagccgcgcaacgtatcagtcagcagccggtccgagagaggaagagaagggggaggggagacggaccgagggaagttctggatcgaagcgcgggcggaccgccggcgggaggcgtcggctgcttcgatgatgcgcacgcgctgcggggaatggagaggacgacggcgtcatttgcgcgctcgaaagggacttgagcaatgcggaggggacagagacggacctgttgaacgccaaccgacgatgaggcttcaaacgggctcgccgccgtcgacggctgctgtgccgcctcgcgcaggatcccagctggacctgcctggtcgagcgacccgcgcggcccgcctccacgccagctcggagcgtacgatgatgagtcggaggaaggccggaaggcggccgtcaggcggattcgcggtgagggcggcagtgactgggccggagcaggcttgcggggcacgaggtggacggtttcttgaggctcgagcggggctaggtgctgtaaggggaggagccctggatcggcggcggtgggtccggcagcgagggacggaccgaaagggagcgttggaaccgaaggagggaggacgggcgtcgagggtgcagagaagaaggcggtcgagcgcgatccggttgacgtcgccgtgcttccccgtctctcgtcctcaatccagagcctcactggcggcggctcgagatcgctctcgtcctcccctgctgccgctgccggcccgccttgttctcgcgcaaacccgccgagctcagagggccagacgacgcgcgggtcgagtcgccgagcgccgcgctgcgagatgcgagcaaagcgcacgacggccggcgtcgtcggcggctcgaggtcctcgtcgttggcgtcgacattgtctgcgtcaaggggcggcgaggtggcggctgaggagaaggtcgtcttggcgaaagacgagcggtcgccggcggacgaaacattccgcgagcgtgtcgtcccagcaccgccggtgatgtcgttctcgtcctcgccgtcgtctccatcctcgagcgggccgtgtgtcccgtcccttgcgagcaacccccggctctccctccggacctgctcctcgcgctcgacggcgagcccgcgcccgagagcgccgtatggccgtccgctcggctgcgaatgatggggaggagcgacgagggtcgatgcgcggcggtaggtgtacgacgggggacggctggaggggacgatggtcgagtggtggcttgcccggcggaggtaggacaggaccgggaggccggcgaagcgtctgtcatagacgacgacgacggggcgagcgacggaaggtacgaagcgggtcagcttgcatttgaggaggcaagaaaggggcaaaggggcaagccgcaactgacggctcgaccgaccggcccgtcaaagcgctcgcggcgtcgtcgccccagccattgaacgacgctgcacgccggcgagcccggcgaggacggcagcagcaacagacgagcagaaagaggacgaaaagcgggacgaggaccgagggaaggatgagggtgaggaggcgggccgtgcgcgcggcggaggcggcggcggcggggtcggtcggtgaaggggttgggaatgcgatggaagacgacggagaagtagtggagggcgggatagacgcaatggttgtcgaagcgaagagagaaatggggtaggccgaggacgaggaaggcggaagagtggcctggctggaagaaagggtcgaggaggcgctggctctggtagaaaagaccgacgacaaacgcgagcttgacgaagcagacgagctcgtgctcaggcctgcagtcgacatcaaagacgctgaaaccgactcgatagcctccactgccggcgagcactctgccggcctgatgtcgagcgtctccgccgcccagagcggcgagcagcacgagcgaaagaaggccgtcgcgtgctgcttgtggcagccgagcgcgaggtagcgcgtgtggtagatggcgtagggctcgagccaggcgccgtagtaatctgacgagcgaaagtaggcggggctggtcagtctcgagggtttctcgaggcaaggaggaggaggggacggaccgggccggtcgtcgggggaggaagcctgctaaggaaggggaaggcggtcagcgactagaggagaggacccttggcatgaggacgaaccatgtttgtgagcggtcgcgaggatcgagaggaaggggaggtagcgcggtgaaaagaagaaggaacggtcgtgatggcggtcgggacggaacgagagggccgccgacttccctccgacgcaagcagcagctccgcctccgatcccagcagcacgcgccaggtctccgaacaagcgagctgtcgcggcggccgtcgatcaacagctgtcggcggatcgctcgagtgggccgacaaagggtcgggcgcgcgcttggcgaagaggggcgactgacgtcgacggtcaacaagggcttttgcgagggtaagcgctgggtacgctcgcgtcgctgaggggctcagcgggcagcagaaagggacgcgcgagagtccaagaagggctgtcttgctgtcggcaggcccgcaggcgcacgtgggaaaaggccatctaccacctcctccaagactatcgcgagaagcacatggaaaacttcaacatggacgacgacgaagtttacgccgccggcggcagcagcggcggcggcgcaaacacgagcggcgcgagcacgaccggtggaaggcagacgcaggcgccggcaaggcatcagcctgcgccgaccaaacggcacgtcgttcaggcccatcggcgaaagacgtcggtcacgatcaacaagtactcggagtcggccagacaggggagcgcgggcaacttgagcggcaacagcgccggcggcgcgcccggaggagggggcagtggctcgagccattcgagtccggcaaagcagaggccggcaccggctgcacccccgccaccgccaccaccgggccggcccgcagcgccgacgccaacgaaggcttccgagggtgcgatccgctcgcccggccatgctccgggcccgccgcgccgtgagccgtcatacacccagcagcagcagggggccaaggcgcctccgcctcagctccggctgcccgtcccccagcgtgccaactcgcactcgtcccagacgagcgtcggcggcggctcgggacgcccggccggcccacgcccgccgctgagccccagagcgtcagcgagcgacgtcgtgacgacgacgacaacggtccctgcgatcatcctccaggagcctagtccgggcaggccggcgagcaccgtcctccgtgggctctcgcagtcgggccctcacggcgccggcggtgcggcctcgaacgcgacggcggcggcatcgacggcggcggcgtcggcaggcgcggtgacggcgtcgggagactacccctcgagcccttcgccccagccgctcggccagatggcctcggcccccggctcgccgagcccctcgccgctgacgatccctcaggtgcaaaacatggaggtccagcgcttcttcgaggacattgtcgagcagctctcgtcgatccaggccggccagcgccagtccatctcgctcccttcgccgacggcggccgatcagcaggcctacctctcatcggctgccgcgtacggcgctggtggcccgctcggctcgccgacagcctcgccccagcacctcgtcttcccgccgttccggccggtcaacagcgccaacgcgcccccgacgacgccgacgaccctcttcccgagccagctcggcggcggcggcgggccagcagacgtctacgaccagtttgaggacgccgagaacgacaactcggacattgcctcgatccactctgccgcgccgacgacggccgacgggcatgctggctcggtccgcgcgccctcggtctactacccggaatcgagcgaacagatgctccccgggctcgggctcggcatcggcaacctcgccaacggcggcggcggagagtacggccgcgtcgtcgtccagcgcggcaactctgtcggtagtggctcgcgcgagccggccgccgctgggctcaggccgccggcgagtccaaaccagatccgctggagcgtcgcctcgtccgtcgggtccaactcgtcgcagaagcagcaacaacagcagtactacgtctcgggcggcgcccagcagccgccgtcgtcgtaccggacgccttcgggcagctcgtacggctccgacaaggagaatggcaccggcccggttggcccccaccgccaaaactcgtacgaccgggcggcgatcccgcgcaagccagccccgcaggcggcggcgggcgactacgcctaccagcagcagacgcaggcgtacagccagcagcagcagcgggacgaccaccgccggtcgcagcacggccacggacacgcacagcagcagcagcacgcgccgagccggccgcctctcggcgacggtcggagctacaacaatgcccctgcccaaacgcggccggcgcccgctccggccagcaaggcacctgcgagccggtcccgcaagcgtacgtccccttaccgcccgccatctctccttcccttcgcctcaactgacccctcaacacctctctccccggactgcagccctcccgccgctcggcatctcgagcgtccacgcccctcaggagtcgagcaagcgctcgtggttcactaacctcttttcgttcaaggcgccctcggccacgctctactcgctggaagaccggcggccgacgctcctcgcgacgcgggcgctgctcgaggcgctcggcgcggcctgcacgcaggaaggctcgatcaactcctcggccgtcctgctccgctgcaggctcgacgaggtccgcgacccgtccggctcggtcgttgtcgccaaggccgtccgtttccgggtcgagttccagccgtgcaacgagcgcgtcggccaggcctcgggcttcgtcacgacggtcgccctcgtccaggagaagggcgccctctcgaccttccgctcggtcgaggccaagctccggcgtgagtgggagctcgacggacccaagacggcgacgctcaacccccgccagtcgctcgccaactcgcccctcggcggcgcctttgtctacgtctgagagccccgcgcccgcgcccgcccccttctcgctttctctgtctcctctcatgtcacgaactcttttattgatcgcacctgtcccgtccccctttcacccccacccccaacacctcgctacgtccctcttcacgtgacgggtgccctggcctcgattctcgtgcacgcgtctctgcgtcctcgattcctgacgctcccagggactactacggctccacccgtcgtttcgatgactacgacagggccccgccccctcgccgtgacgagcgcgactaccggcgcgacgaccggtgcgtctcatactctcttgtctcggcgaccaactccccgctgactcgctcccctacttgcagcgagtaccgccctcgcgaggactacccgccccggcgtgatgagccccgccgcgacgagccccgccgtgacgagccccgccgcgacgagccccggcgcgactacgacgaccgccggcctgcctcgtacgaccagcggcgtgagcgctctcctcctcctcgccagcgcacgcgctcgcccgcccctgccggcggcgaggcgccccgtgacgctgcgccggcccagcacgatgagcgcgctcaggagggaggcgcgtctgcccagggcggtgctgacgcttggaactagacggggttgagctaaaagggcgggccgggacagcctccgcaaagggagcgcgctcttgcgtaactttatccccccttgctgcgacggtcgctcggcggtcgcatgctggcccttttgcctcccctcacttaatcctctctgctctcgctctcgatgaaaagccctcgtctctgtaccttgacgtctgtcgtcgctgacgcgccaccccgctccgggccagcctcgcacttgcactcgcactcgtcgtcctcgtcgtcctactcctcgtacccgcccgagctcgcgccctcatacacaccttcgtatacgccccggccgcggtcgtcggcgtctgcggcgcgccgtcaccccgacagcggcgaggacgagcgggcggagtacgaccctaagctggccgagtggctttgagctgcaagcgacctggacctcatcgcaagcgctcgctctcgcgctctcgcgctcgcctcatcgcactctctcgtctcgtttcgtcgcgcacattgtgcctcgattgtccctgccgtctgtgatctgccactcgcgccggcctcgcctcaagtcgtcgcgctcggtcgctcctggtcgcggccgcatctcgtctcgtctggttgttctcgtcttcgctctcagccgtcttcagcctcggcccgcctactatcagcgccgttgctggcctatgccctgccctgcccgccgctccatcgcctccgctacttcggccgcctctcgctggacgtctcgcagactctgccccgtgtgctgcgccgccgttcgtccgcggaccgatgtttccctcttctcacatgctccttcttcacccttgcgaaacgcgcgaagcttgctcttgcgtgaggcgggcgcagacgatgccatcgccatgggtcgagcggcatcgagcgcgaaggggggggggctcggtttcctggcctcgctctctcgacagcccgcgccggcccgacgtggaatgagaccagcaggaacgtatctgtcgcaaggagcgagctaggaagctaggatcaggtcgatggcgatgctgctgacaggaagcaagggggaaaaggaggaggaggagcgaggcggcggcggcggcgggcggcaggcggaacaggtcagcgccggtggtcccgtttccccgccctccccgatgacggccgacgacagcacggacaggactgatcctcttgacactcttgctgctctcaggatcgatggtggtcgtccacaggccgcaggaggcgggcgacaaggcgaagcaggtgggcgcagcagcccagcagcgacctgcgccttgggacccgcgcccccccccctttggctagctggccatcatctgactggatcgccaccagacaacttctggcaatctctcctagcttacaggaacccagcggtaccggtctcgcagcgatccgataagatcctgtaaaaacgtcacttggcccgcgcaggcgcgggatccccggaccccccttacaaggctttccgaccgtccctgtgactggatcgccggcagacttattgtccgcatctctcctggtcctggccgaccagccaggcaaagtcccgtgtgaatcggataagattcggtgaaaaaagtatgtaccccttgccggggggtatccgcgccatgagcgatggtgtcgaagcgacgggccgcacacaacgtgacaccattcggggccctcgagcccaagcaccgggggctcactggaagcacgcccaggccgccgtctcgaactccgcctcgtctcctcgtcctcgtcctcctcctgctcctcacccacttctcgtctcacaatgtccgcccgcctcgcctttgccttcacccgccagacgcccatcgccctcgcccgctcgtcacgatctgcagtggccggcccgtcgtcgctcgtcgccgccgcccggcgctcgtcctcaaccgcgcctgcacccccggccgcctcggcttcggcgccgctcgcgaaggacccagcagccgtcgctgcgtcggcagcggccgcgcctggagagacggctactgctggaccgtctcgtgcgttgtcctttctcgccatccaagcttggcggacgtcagacgtcgtctcgcggctgacgctctttcccccccgttaaaaccattcagctactgcgctcgcacgagggtcgagcaggaaaggagggagggaggaaggggacatacgtgtcgacccagctcgaacatcggttgccgtccgccttgtgggccgtacagcggcccatgtcgcgcgcctggccgatgacaacaaccgtctcggccgaaaccggattgagcgcgagtgcgttcgtcaacgggtggggcgattgggcgttctgatccggaaagggtgagtgagtcagctcggtgcgtcatccttgaggagaaaggaggaggacggactttgagcggtcggagcaccctcggattcaagatggccaggaccgtcccgaccttgacgttccaaaactgttcaaacgcccccccacttccacccttgtagaccttcttgccctcgcccttgccgcccttgacgttgacgaccgaatcggcctcgaagaggatcagattgacggtcgcgtcgccgttggtcgcagatttgccagacgaacgcggcgggagggcgacgagccggtacgtgataaactttttctgtgccagaggcggctgccaccttttcttgccggtctgctgctgctgctttggtgctgccgacttgacgccctcgtcgccagacgagtcgccctccttgcccatcgccggcccgcccttggtcgtccggaccggcccaagctgctcggcaacgaccgcgatcgttacccagtcgccgtcgagcgggaccgtaaaggccgtgccgtcgcgcgaggggtcgacgattgagtagagaagcgagggcggcacgtagaagcggtccgagaggtgttcctgtaggaggtagtgcggaagcgtacgcttgctgggagcatccccaccgagctcaaggggtcagccctggccgcaaagtaaagcaagggtgtgtgtgtgtgtgtgtgaagagacgtacctgagccggatttgcgagtttggctcaaccgacgcccagcggccgtcgccctctggcccaaggccatgctcgaccgagcccatctcgagcttctcgacgagccgaaggttctcagcgtcccgctcgaccttgacggccggtccagagttgctgccggcttcgagggcggaacgcagctgggcttcctcctcctcctccgcttgaccatcagtctcgcgcgctttgcccttcgcgtcgctccccctccctccactcccgctcgcagaagcagaagcggcgcccgtgctcgccggcgtccggccaaacgccgtcgaccggccgtcttcgattcggttcgtccgcgccgtctttgagcggtgctcgccgagcttggccgagaacgagctcggcttttgcgagggcgggataaagtagttggggacttgatttttggctggccgggctgggtgccagaaagcgaagagggaggttagcgagccggctgacgaatggagctagtcggagggaagccctggcagagcagaggggacgcgaccaggagacgtacgctcgacgacccggccgtccttgagtgcgaaccgcctatcgccagccggacgtgtaaagtcctgcgggttcagaccacctgcattgcgaggcaaggtgagcgagttggggtgaacgagtcggtcagcacccgatcgtccgtcacgagaggggagagggctgacggccggtgcgcttcttgggcgggctcgcctggacgagaatgccgccgctcggacgcaagtcggccgagccgttggcttcggtagagagaaggcgttcgagcttgctgctgctcatggtcggtcgatagataagggtgaggagtgacggtcagaaggcagaggcaagcccgccaggtcgcgtcgcgtctagctgctgctgctgcgcgcgtgtcggctgagattcaaactccgtctctccgcgcctcaaagccagcgttttcgccgcggtcgctagccctgaccctcatccttccagcgtacgtccgccgccgacccctgccctgtcgtcgacccgtttgcgctgctgacctcgatcaccctctctctcgcagtctttttgagtaacatgatgacaaccttcctcggaagcagcgagatgaagcctcgacggggacccgaccctctcgagggttgcggacccctcggcagatgacatcgagcgggcggcttccacctttaccttgtttagcaaaggcgcgctcataacgtacggtctgacccccctcatacaagagctggaaggctttttcttcgtttctccctggcgccgacgcggcggaggtcgaactggacgacgccctgcgctcagcgttcggcttctgcccttgacgcgtcttcttcatcctcctctttacacttctcttgatcttgatgctcttccgacgaaccactctgcctctggagcgagccctcagtctgtccagtcaagagtcgtgaggacgcgtctcgcaagcggcagcagcagcccagctcgcgccggctcgacccacgacgtcgaccctccgaccaacacctcttgccttgcctctcaccccgacccttgccctactggacggctgtagccttacacgcagcacatacgccccgcccgtcccttcccaagtgccagccgctgctgcctgctgccgccgacccagcgaacccacagcccatcgttcacgctcaacgccgacccgacccgccgagatgtgtataagagccagcgcccagcccgagccgatcgcccagctcgcagcgctcgtcaaggcccagctcatctaccacgcccacgcggcggaggcgctcggcgcgatccagaacgagctcgatgagtcggcgctggcggccgagaacgagtaccggtgcgttgtttgacctggcggggcgatgagtgcgggttgatctcgaggagacggccgcctcaggcttggggctcactcgaagcctttgttttgtttcctcttctaacaggcatgcccgggcttaatgaagccgccccagctctctctctctcgcccctgctctctctccttctcgcacgcgtctcttccatttctcctcccaaagccccgattggcgacgcgcagccggccgccttcccctgtctcgtcatgacgacgttcgtctgcatgcgattctggcgacgaggggacaaagaggggaaatgactagcctttgctgatcgtgtgcgagatgaaagagagggctcgcgcatggggttggcccagtcataaagaagcgggcgatggtcgactgcgcgctccgccagcagagagagagaggagggcgtgagagagggacgggggacctcgtctcttccagagctcgtttgtctctgccacgatctgactctcggccagacatgacaagggtcgcttgtgctctgtccaggcaagaagcgcatgtgtcgagtcgggctcggcgggcctggcatcgtccgcttcggcctggtcctgccgggtctccgacgacgaaactctgcccgcgcggagggcgcttcgggcgttgtgcctgcctgcgccgcccggctcgtccgcctcctcctcctctccctccaacccataaccctccgtctccctgcctcaccctgctcctcggtctcagcaattcccagcctcagtctcccagaaaggcgacctctctcatccccaacccaccctccatgctcagctcgtcgcggccgaccttccacctcccgccgatagcttcgccctaggaagggccacgttcagcccactagcgccctctcgccctcccctttctcctccttcaccttacgacaacccaagcggatcccttagcggctccctttcttcctcttcccaagaaacccaccctcatccgcccgctcccgcctaagaaggctcaaagccgacggatgcccccgtcctcctcctccacctcgcaccaccccggctcgcctcaccgcctcccgccggcggcgccgccgacaaagatcaagtcgctcaagctccagtttcgcaatccaaactcgcagtcggcggcgtcgtcaccgggagctacaccgcctcctccgccccagcagccggtcgcgtcgtcgtcgtcgagaccggcgacggcggctgcagctggcaaggagaaggctgcgctcgcgctcgccaagcgcaagaagaagcagcaagcgctcgaccggctctccaagaaggcctcggcctcctctgctggcggctcgggcagtgcgaaccggagcggccgggcctcgcccgcgccaacgaccttcctgacggccgggacgtcctcgcgccctcaggtccatgagattgtccgcaagccggcggtgaccgtgtttgccgcggagccgacggccggcttcgaggtggacgacggcaactcgacgctttcggagctgtcgtcggccgaagacgaggatgaggacgagcagcctctcgcgggcccgtcgttagctgctgctggcgccggcgcaccggtgccgtcgcacttcgacgacgacctgttggaggacgccccgcgctgggacgaggcgtacaacggcgcgtgggagcgccggagagggagcttcccgagcgacgacaatgagtttggcggccggcgaggatcacgccgtggcggctcggccgatgggaggggctcttcctctggctcgagctcggacgacgacgacgacgacatggacgacgacgaggacgacgacgacgacgactcggacatgaacggcctctcgggctcagaccactctgccggaggcggcgtccggatcctctcgtttgacgccaacggcgcgcgcgtcgacggccacgcgtccggcggcggggggtggtcggacgactcgagcgagggcgaggacgaagaggaggagctgtggttcgaggactacgagcagtttgggacgatggagccgatggaggtcgacggggccgaggctgcggttggagacggcccggcggcaacggcggtgctagcggccacgacgtcagcctcatcgctcgtccctggcggcaatcatgtcgtcgatccagcagcagcaacagccgcagctacatcagcaccggcgacggcagcagcggcggcggccggcctcggcggctcgaccgcctcgacctcgacggccgagccctcgccgaccgagcatgagctcgacactcaagcgttcgacgccctccaatttctcgccgacgacgccgacgttgccgccggtcaagtctacgaggacctccaccggtcgcaccaggacgacgggctgcatatgctcgaggactttgacggccagctcatcttttccgcgctggcggacgcgctcgggggtttgggcggcggcgcggaaaagatgagctggccgtcaaagtcctcgagcatatgcaaagagggaagggaggcgagagggaaggaaggaggagggtcgactcacgaaggcgccgagacgccgccgacgatggcctgcgtgctgccgttgacggcgccggcctgctgctgcgacgacttgcggatctggctcgtccgcgggttggcctgaccggacgaggcgttgcgggcgtcagtcccaaacatcgagaaggaaaggaaagcagaaagacaacgcacgagagacaggcgccccgccctggctcgcacggagccgctcgcgctcggtccggtcccgctcgcgctcggtccggctccgatgtccgcgtccctgctgatcctgcgccggcgtctgggcgaggaccgtgctgaccgcctgggccgacggacccgcctcccaacctttaccgccgttgagcagcatccagtcgtacacgccgtcctcaacctcgcccgtctgcttgagcgcctttgtgaagagctcgcgcaaaaagtcgtagtcgggcgtctcctcaaagccgagcttgcggacgtagttgaggtagatggcaaactcgtccgggtagccctcgacgaggtccttgattggcgtcgactgcttcttctcgccaattttttcatacttttgcttgttggtcgccgctttgagcccttgccaggggaggccgaccgagccccggaggaagtagaagaagacgtggccgagcgcctcgaggtcatcccgccgcgactgctcgcgcccgaggtgcgtgttgatcgacatgtagcgggccgtgcccgagagcgacttgcgctcgcggtatgggatgtgctctggcgcggggcgaggggacgggggcaaagggtcagctctcgaggcccactcgggcgcacacgcggggagagaggacccacgcttcgtcttggggtcgcggtactgctttgccatgccgaaatcaacgacgtgaatcatgtttgcgcccttcgtccccggccggccgatcagaaagttgtcaggcttgatatcgcggtagatcaagttcttctcgtggatctgctggacgcgcgtgagcatctgcttggccgtcatgacgaccgtcttaaccgagaagcgccggccgcacatgtcgaacaggtcttcgagcgacgggccaagcaggtcgatcacaagaatgttgtgcaggccttcgttgccaaaatagtagacctgggggatgccggctgcaaaagcgagcaaagcgagcacgcgggtcagaccccaagcaacaagccgccgtcgcttgcaaaaaggagacgccgggacgcactgcagcccgagagaatcttgtagctccggtactcgtcccggagctgcggggcgtcgcttttgcggggctcaaacttgatggcgaccgtctgcgagttgaggaggttggtacctgggcgcgcggaaaaaggggggggggtgttagtctggagcgctgggtgataagcggggagacgatggaagggagggagggagaggagacgaaggacgtgtatgcggctgccctcttcttttgtcccgtcttccttctgctcgatgaagagcaagtttcgccctgaccccgacagacgactagtcgacatgctacccctgcttgcccgccgacctgctcgcctgccgagccagatgagggaaggctaagcccttcctccccacctccctccctccctccgtcgaccgaccgaccaaccggccgacgacagcatgccaccgctagcctacgcctccgaccggcgcgagttgatcaaagggcccgcgtcgggccctgctagcaagccgacgagccagccgaaacaggcccgtcttgaccctatccaacccggcccggcgccgctcgactgagcgcgagcgtccaaccgccccagaccggccgcctttcgtcgtttctcggaccgacaaaagcgacctatcccgcgctcgccgttccagctcgaagctcgtagctcgactggcaagaggcgccgccaacgcaagctcgccgcccctcgcgccgcggccgcaccgcaccgacgtgcgaaccgaagcgcgcgaagccgggccaggacagagagggaagaaggaaaaggaagggggcgttgcttgcaagacaagaagaagaagggccacatggggccctcccgttctctgcgaaaaggaggtcgcgatggcgggcgccgcgcgcgcgcgcgcccgcgcgcgctaggaaggaaggcaacggttcgggcgggcgtgtcggccaacagacgctggccctgccttgagcggggctcgttcgcgtgcctgagctccagggccagggccgaagaagggcgacgtcctggggcgtgagacgtccgagcaggtggtcgaaggagaagatggagggccgaggcgagaaagagagaggagacggggcacgagagagcggcgggcgcaagagaagggaagagaggacggaccctcaaagatgacgccaaacgagccttctccaatcttcttgccgacgcgataatgcgtgccgacgacgttggacgctcctccgccgctgctgctgcctccactgttgctgctcgaatggccctggggctgggcggcggccatggcggcggaggaggagggctggccggcggcggccatcgcgttgggcggaggggggaggagcgagcggaaggacgggtgggcagacgggcgtttctcgagagcgcgggggcgaaggcggcgcgaaaagggcggcgccatcgccctcccgaccacatctctctccctcctcgcccacctttccatccctactcaacgttagtctcgaccgctggcaggagcaaatcggacgagacgctgatatgcttgccctctccccgtagctctttacaatggctttcgttcctgtttcgtggcgtgtacgtctccgccgtttgcccgcccccgacttttcctccttgccctccgtcgatggcgcgacaacgacgcgattctcctttcgacccatcctgacctagtccccttctccctgtcctgctccaggacgtcggcaagtcgtcgtcggacctcctctcgaaggacttccctctcggcgccacctcgctcgaggtcaagaccaaggctccctcgggcgtcgcctttaccgtccgcggctccaaggacgcctcgtccaacgccatcaacggcgacatcgaggccaagtacaacggctggaagaacggctacgcgctcacccaggtgcgttctcggccagctggttgatcctctacccaagagaggctgacccttttcgtctgcgcgcgcgatatgcctacccaggcctggaacacggccaacctcctcaagacgacggccgagctcgactctgtcctcgccaagggcctcaagattgacgtcacgacgacgctcaacccgtccaagaacgccaagggcgccgtcctcggtgccacctacaagcaccccggcgttcacgccaccggcaccgtcgacctcctcaaggttagcagctgccctcttgcggggccgtctcatcaaccctttggctgaccttttttcattcctttcctttgctctctgccagggccccaccgtcaccgccaacgccgtcgttgctcgggacggcttccttgtcggtggtgaggccacctacgacaacatctctggcgccgtctccaagtacgccgccgccgtcggctacaccgccccggagtactctgccaccgtccacgctctcggcaacctttcgatcttctcggcctcgtactaccaccgcgtcaacgtcgcgaccgaggctggcgccaaggccgtctacgacaccaagtcggccgccaaccaggtcgcgctcgaggtcggcaccaagcactacctcgacccgaccgcgtttgtcaaggccaagattaactcggccggcctcctcgtcctcggctacacccaggccctccgcccgggcgtcaaggcctcgttcggccttgccctcgacaccaagaccctctcggacccctcggccggcgcccccggccacaaggttggcgcctcgtttgtcttcgaggcctaaagttgtcgaggttccgaaaggagagggccgccttgctccttcgcgagcggagtgtgcccgacccgtctcatgtctcctccgcccgactcgcttagccttgtaaacaccgcctcccatctctattcgcccctcctcccctggtctgactgataggaagaatctgctcccagtctgtcttcgtactgcaagggacatcgggacggcagtcgaggttgtgcggagggcgtcatctgggtcgaggccgcgcgcagggcgtggcgagactgagtcggtctcccgtgaggaaaggccgccaactcggcagacgcaatgcccttctcgtagtttactatccgtctcagattcgcgattcgctgcagggcaagctctgcaggtgtttgtctgccgcatattgagcgccgctcgctgcgacgcattactgcgctgcgacgccgcgcctgtgctgcgctcgggatggccccttctcccgacctcccttgaccatgaccttcaccgtgacccaaggtggcacaacggggtttcaagcaccatcgatcaccggaccagaaggagcggcatcgaagctacaaaagggggcggcggcggcgagaagtatgtgcagcgcgaaggagtaaatcgaatgggtcgcgaagagcaggctggaggtagtcttactcgagtaaggtaggcttgggagaggagggacgggctacacaagttcagggggcgtttggagacgatccgccgactctgaggtagcgacgtgtcaagaattcgactccttaaaggacggagaagccagtgggctcagtcgggtcgcggaagaagagtgctggcccggcaacaatcgccgtcttgacctgaacaacagggtccgccttgaggggagtgttgttgccagtgatccagacgtagaccgggccgtcaacgaacgagtcagggataatgcactcgcctgcaagtatcgaggaaggtgtcagctgactggaagcatacccagagacataccggccagcaatcggaaaagactcaccggtgccaaggacaagcgcctcggacatgcctccctggagcagctgacagaagccgtcaagctggggaacgccacggatcgagaaggtgatctgcttgtggctgacgtcgatggtgagggggcggttgaaggcgatgccgagctccttcttgaaggcgcacttgccctctcccttgacgaggtaggggctgatgagagcaccgaccgactgaggggtgagagcgatgtcgtaggcgttgggcgagtagctgccgccggcgaggaggttctgaaggggaggagggagagctgggtcggagcggattgggctgagagggccgagagcgttgacgggagtgaggggaggaggggcgcgaagagcgggagcgagaggaagtgctgccgagcgaggggatgagacggatgatcagaggcgaacccgcttgtctgggtggtcgacccgatgctcacagagtaaaagaggccctcctgccaaacgtctccgtgtagcctgtacgtcttctcctgccagatgcccatcagcgcactgagcacgagcgccgccgtcaagatcccgatcccgcccgcatagacccagtcgaagccgcccccgagcgcctcggcccgcctgtctgccgcgcgggccgagggcgtccgaggcgcgtcctttggcggggcggagagcgtggcgaggacgatgccggacgtgacgagcaggacggcggcgatctgcgagggccggtagcgccggttctcgaggaggtagttggtcgccatcgagacggctaggccgcccgagcggaagatgatgtggagcgatacggggatctgagcggcgagcagggtcaattgacagatcgtctaaggggtgggtgatttcgatccacagtgacgcacgtgccagccgaaagcgtagttgttgagccagctgacgcccttcgaagaggatcaaccgcgcaggaatgagatctcagcccgcatcctcgccaaagctaacgagcagccagccccatcgacctggcgaaacgcacaaagaagaggacgacctggacgagccaccgcctgagcgggacctgccttgtccggagcctcgggagccacgcgcttccgccgcttggcaagcggacgatttcgcccgacgggagccgctcgttccgcgctggctgggtgaaggtcagttgcgaggggagggtttgaagggtgacgaagaggaactggaggagggtgatgagcgagctgcgcagcacacccgtccgggcgccgaaggaggggtggaggggaaggcggtcagcgcgcggaatcgctttcctacgcgaaatgctgaattgagagacggacccgacgtcgggcgccttctggaggacgtgctcgagcgcaaagacgttgctggcaggcggtaggagcggcagacgggtcagggtgggtcgtcgacggtgagccataagggtggcggctgcggcggcagcagcagaggttcggccgcaagctgctctggcgagactcacgcgcaacagccaacaaaggtcaaacagacaggctcggcgaggtctgccatcgggtgattgtcgagagtgaggagagacattgatgtaggctggacgaggttgaggagagggcgacgtggcccgaagtgcacatgcaagttgggccttctctttgcccgcctgctggctggcctcttccgcccctccgtccgacagcccaccgaccgtcaacttccctacccactcggccatgttcacccgcttctctgctcagaccgccaagaaggcggctcaaggcgtgagtcctccacgaccctgcgtaccgaccgtcactgccggagcgagcgagagacacatcggcgcacctcttggccggctctttcttctccggccgacgtgataggccgcgccgcacccagccccatcgacgtcgctcttcctactgacccgctcccccttacttccttcatccttccaggcccgcctcgcgtcgacggctaccaaggtgcgtgctccttctcggcgagatgcagcgctgcatccgccgccgatccagtcaaggggcgagccgaggctgacctttccgccgtctcctctccctcctccgccctgcgtttctttcgcgcgctcttcctctcaagggcccctacgtgccctcgcggactcacgtcgccgccgccggcggtgtcgccgcgacgacgctcggcctctacacgtactcgtacggcctgccccggccctcggccatcgtcgaggcccttgcggccaacgggctgattgccgaggcgagcgcaaacacgatcggcgaggagggcttccacccggccgactacgacttctatcacaaggggtacctcaacacttttgaccatgcgtcgtgagtctccccgaccactcctttctcgtcgggtcgtatcggctcggggcgatcgggtgggggtcggtggtgggaaggatcgggcggcagtcgcgtcgcccttcgccttgcgagacgcgcgaggccaaaggaagatcggcaggcgctgggatgcgcaacagcggcgacgcttggctcagtttctccgccgatgcatctcaccctcgacaagcgactgaccccgatcgctccggttctttttcgcccattcccggcaggatccgccgcggctacactgtctaccgcgaggtctgctctgcctgccactcgcttaagcgcgtcgcctggcggacgctcgtcggcgtctcgcactctgtcgacgaggtcaaggcgatggccgaggagcacgagtacaccgacggacctaacgacgagggcgagatgtttgagcggccgggtaagctcgcagactacatgccgtcgccttacccgaacgacgaggcggcccgcgcgggcaaccagggagcgctccccccggacctctcgctcatgactaaggcccggcacggcaacgtcgtgcgtttgctctcctctcgccagtgacctaccccgcctccccgaccgttccgaaccgtgccctccccttgctcgtcaccctccaagcctcgatgctctcgcatcagtcgccccaggtccgctttgtcctccgcggcaccgaggcaaccttcgtcaagcacgggatcgacccgcaggaggcccagctcgtcaagggcgggacgtatggcccgaccggcaagccagagcctggggcggtccgcgtcggagaggaggcgtttggggttgaggcggaggagcttgagggaacgctttatacggcgaagggggccgagaaggtcgggaccgagcgggggtcgtacatctgtcggtcgccccttccttccctccctcacccttcttgctcgaccgaccgatgctgatccctcctctccccgttcaaccccgacccgtcgcgcactaccagcctggtttgaaaacgtcgccgacgccgtccgctcggccgacccggccaagctgctcgtcacgccccgccaggcccagctgacgatcgagatcatcgaggccgccgtccggtcgtcggctgaggggcggacgatcaagctctagagaggtggggcgactgaaccctgagcgggaatgggctgcactgggttttggtcggctaaatcgtatctgcgcttcttcggatttcgatctcgttcgggtcggcggaagaccagctgaggctgcttttgagaggctcgagcgaggacaaggcagggccaagacggccagcgagggagaaagtggaacagtcgatcgtcggccttcgctcgcgccttcgttcatcacgccccccgttggctcgtctcgatcagagcgccattaggaccccgtcagagggcggcgcaatgccatcgttcggagagtcgctctccacctgcacggagggcggtgccggggccggtgatggaccgctgcaacccccgccgccgccgccgccgactctgcctgctgcgcctgggctctgcgtcgaggagggcgagaaacgtgcaacccccggggccggtctgtagcgtcaacacagctcgcaggcggtcaaacagcaaaggaggacactcgaccgactggtgcgcccgggaaatcttgaggcctttcgccttcgacccctggctggaaaggagaggcggaagccgtcagccttggctctgagcccgagaggggaggttcaaggggagggggcgcacacgaaatcatcgtggctgttgggaccgccatgacgcttgaaagcaaacgactcgacggccgaaaagctgtggcgaacaggcgagcaggcaggcagctttattccagcgagccgtctgaacgccgacaaattggaggaccgaccagacggaatggccaaacggaaattgcggcgcgttgccatcgtctcccgactcgtccgtagagctgctgacctcgaggtccgcgttctaacggccgtaccaatcggttggcgatggccgaatcatgtccagctccttctcttgtggtcggagtcgcaagacggcgcgtcagctacgcgtcgaagtcagcgactttgaaacagacggtgcacctcgtgaggcggaaagcgtcgatcgacgctgcggagaacggcgcatgtcagccggagcggccgtcgggggtcgcatgcatgcagaggcgcactgctgcgatcgagcgtggcactgtcgacgatcattgcgacccttgccgtgcgtgtcgcgaccggctggctcagcgctcgacattttggcgccgtcgagaaataagacgcaccgccagctggaggaagaagggtcaaagaacgactccgagggcgcgctccgccgacgagtcttgcagtctgcggcgcgacgggcgacctcactatcgggcgaccggcaaatcagcagactgccgcgaaggctgtcggaagggggcgacggggcgcacaagtctgggaaggcactgaggcaagatcaccggctgtgacaagcgcaaaggtcagatcatgctgtatgagagcgtaggtaggaatgtcgagatggacaaacatcttctcttcggccgtgagctcgtcgaagatcgcaaagtcgtaacggccgggaacgacctccatcatcgccttgtcccggcaaggctcccgcgggacagcccgtgagttcacacggttggcgatgacggcctttgacttctccttctgcagcgtatcgcgcttaggctcgcttgacttccaatccgctttggtcgcgccccagcgctctcctacgactgtatgataaaaaccgcccgtgatgatgtgccggccaaccgaccagctgcagcgagtgggtttgctctggtgtacctccttgtactgacactgaagtagtaccagaggtcaatcggtggtgtcttgggcaaaccgtatcggggtggcatatctgtcggctcattattgccgagctcgaaggtggtgatcttcgagtcgaggagaacctagagttggcgaaaagaggcgcctggttactgctgttaatcttcacaatcgccaatcgggccgtttcgcttacctgccagacgaggccggtgtagcacgagcgcaggtagcggtttgtcccggccagcgcgaggtggtctcggagctgcgacagcggcggatacaagcgacgaggtcagcgcgagagagagcgcgaaagggaaggcagcgagcgagcgagtgagtgagcgagagcgacgcacaccagcactcggccatcatgatcggctccttgcgctccctcgccgcgcccgccggccgctcgctgccctgctgcctcgagcgcttcccacctcttccccctcctccgccaggcatcttgccccagatgaacccctgctcctcaagcggctcccgcacgcgcttcaccccggccgccgccccggccctcgtgggggcgaacgggttgggcgtcgcgtttggaggtggtgcggccggctttgcgcctggagggaggggcggtgcgaggttgaacgcgtagaaggaccgggtgggcttggcgggcgagggcgaaggaggaggggtcgacatgaagcggccgagctggaggacgcgcgtgaagcgctcgacgacggcgttgggggagccagacgggtcggaggggtacggctcgcgctcgaagaagatctgcgtcgtcgagccgtcgtcgggcgccgggttgccgggtggtgcttgtgccggtggcgggggagggggagggaagaagacgtaccgcgccctcgcgcgccttacaacctcgtcaacgccctcctcgccccctcctccgccagcctgcatcgaagcgcgcgcagctgccgctttgagtgctggaggacacgtcggcgagcttgcgaggagcgttgcgttaggcaaagggaggaggaggatgtcgatccccttaggggcagacagcgaggtcactgcattctgcttcgctgcgagcgcagctgcttggagctcggcgaacccccctcctcctccgccgcttgcgccgcctggaacgcccgtcccggccgcagccgcggagccagtcgactcgagcgggatcgccctcgacccaagcaacccctgcctttcgcctccgtccgcgtcgttcttgagcgcgccgatcgtcagccccccaggagcatcgacgacccggtcgaggacgagcaggacgttgttgcagagctggaagggccgggttgcgcttcccgggttcgggtgggtcgcgatgtgtgcgaggacgcgtgcggggagggggaagaggccggaagaggtgatatacgtcgggagcggcactgtgtcgtcgttcaaccgctcaactctctcgtcagctcgtcccatcccaacaacagggcagagacggaagagagaaacgcaccgtcaagcttcccctcaagcagcagctcaacctcctcctcgtcaacgcccgcgctgaagaagtcgccagcgacgacggcgagcgcgaaggagtgtttcgcgtggagggcagcgagcttggcgaggaagggcttgagctggccagagggcgggccgagagcgaggctaggtgggtccgcgcgcgcgaacgaagagtgaggtgagggaatggccagtcagccatggcagcccgaaagtaggacggtgagagaggcagcgggctcacactttggacgccatcagagatggttgctcagagatggagggtgcgagcgaggggccagggtaggagttgggtcgggccatctggcggctctgcggggtgggcgcacgtcgcggagagagagcgggtgacgttgccatggtgcctgacggtcaagggaggaagataatagactctctctctctctctctctctctctctctcgctctctctctgcaaagcggtgggcgagaaagcctatatgagcggaggacatgcaaatcgttcgcgagctcgagaggcctgctgggaaggaggggacaggttttgagcgggcttgcgcccgtcagcagagcggcagaaggcgctcaggcaggccgagtgagtgctgtgctgaggagcgatgggaggcttctatcaagcgcactcaatggaggaactgatcgacagctctagcggagagtgacgaaggcgggtgtagagtgcatgcggactggccgacgatggccagacaccatcgggcgagtctcgaggagcgtctctcgtcgtcgagggctgctgcgccccactgccctcctcccctccggcaaccgctcgggccgaccttggcctcctctgctagaccttcgacacccatctaccgcctgcccatccaatcattcacagcatggccacttcatccgacgacgaagaggagaggggcgtctttgcgccgggcatcttcaagggcaaggttgtcttctgcaccggcggtcagtcctcgagcgagcgagttgagcttggcgtcgcgagcgagggctgacctcgttgtcttccggcgtcgcctctcgctcgtcaccatccttcccgctcgcccgacctcgctccctcacctgcggctctaccacccgtcccaggccggtccggcatctgtcgctcgatcgtccgcaagctcctatcgctcggcgcaagcgttaccatcgtcggccgcaagtgagcctccctctcgctctcgctctctttccgtctcgtcggcgggcacatgaactccctctggacctcgttttggccaaggggatctcgtgggtcaggcagggcttgcaagggagggagggagatggtccaccccttgagctctccatcttcccccgtgtctttacccgaacgccggtccccctcaccctctcccctgtactaaccggttagtggagggcgtaggaagaggggggggcgagagggcgaggcaggcgagcgagcacgaaggcgaagagcggtcgtcggtaccctcagcctgctccgagctgcctcccgctggccggaggaagttagaaggggaccggcgcttcctcgctcgctcggcttgggccaggcgcctggcttggtcgagtcgggtggcggctcggaggaggaaggacgagcgagcgagcgagcgagctgcgtcgtcgtcgtcgcccgtcgctcccctcgtctcctctccctttcccccttccatcccgtcccccgcttgagatctcccagacacgccgaaagagaccaaaacggaccaatctgcatctgtaagagcacaaagcatcagacgggttcggatgacaggatgagggagggagagaggaggtcagcatcggccggcttctgactggaaggacgacgacgacggcggcgggcgagcgggcgcgcgggggactcggcccgaagcggtcctcgccagtgatgccgtctgtccatcctccactagcagcgagtgggcgtgaaggagaggagatggaagggaggaacgtacgacgttgccggtccagagcatgtgcctgctcggcttgaggaacttgtctgccggcgcgggaaggagggagggagggacggtcagaggacggggtctcttgcagcgcggagcgggactgcgaacggctgcgagggcgcactcgagtagaggggcttgtagggcgccatcgtctgcgaggaagagagtgtcagcgtcagagagtgcgtgtcgtcagagtcggaaggaggggacggacgagtagactgggcttgctgtgaggggatggcgggcaggagggagaagagggcgcagcgaaagctcgcctcgacccgacctccaaacgaccaacacgaccagacatgccattcgacgccagcacccctcccaagcccccaggggcgaccggctggtcgcgcggtgtgcctgtccactaccctagtccctcctcgcctcctctcccgcgcccaacggtgcccccgccagtaacgacgacgacgccgctcgcttcggccctcgccggcctcccaccctccgtctcgcgcccgggcgcccagtcgcttgccttcccaaaggccttcgacccggacagggcgctgctgtaccagcgggcgatgagccgggcgatgccgaagaagacgtgggcgagcaagggcgtgacgctcgccgtctggctctcgagcgctcgtccgtccctcctatcctccctttgcgcactctctctctctcgctgctaccagggcacgtcgctgaccggccccgcccgcccgccgcactctcgaattacgtccccgccagtgttcgcctaccggatcctccttgtcgaagacttcgggcacaacaacgtcatctttgccgacgtgcgtcctctcaccttcctcctgtccctcctactccttacgtgtgccctcgccacgacgcccaagtcgacccttctcggccgccggctcgggtcaccaacggcccccccgctgccagagctcttaactgaccccctctccccgctcgcccgccaatagtaccgcaaagagcggctccggcgcctccagctccggcggccgctgaccgcgtccgaacaagcgcagtgggaccggccttggcccgagccgaccgagagctttagcgagtggatcgagcatgcgcgcgagaagcatcggaggaggaaggcggcgctgatggagaagcgggcggaatatctcgctagggaaactgctgctgctgctgctgacggcgagcagggagcgtcgacgacggcggcggcggggtcggcagcagtaggaggagggatggccgacctctctgaccttacgcccgggaggaaagtcgactggcgtcgttgggagtcgcaagaggctgcacggctcgcgagccaggaggcggtcgaggacctcccggcggacctcgattgggggcggatcgggctgctcgggcagttggcgacgggcgagggtggtgcgggtgggccgaggctttgaaaggagtcgccctgagctcggtgggtgtggagggttgcgcggatgactagatgcggttctttcttgaaaggttggggctgatcgctggctgcacggtgatggaaagcgatagtgctcaagggggtttgacacgggcagacagcgggccagctcgactcgttgacgggccggccgggtgagcacactcagaaacaggcttcgattatagacagacggggcaagacgggcaaaaggacggggagaagacattcgaagcgagatggcagcaaaaggggagcgcaagcggaggatcgttctggcacaaagagagggctacatgagctcctcgagcgtgagcacgccgcgggccgtccagtcgtcgccttctgcctcgacgacgaccggctcggaacgtgcctgccgaccagcctggagcgagcgcttcccgctcacgctaccgctgcccttgaccaccctcgacgcgccgagtggctgcctccccgaggctgacggcccctgccggcgtgagacgcgcaggagctttgtcggcggcttgctgccgatatcgacagagcggtacgaggagagttcgtctgccgtcgagtgcccttgccgccctttccggttgacatctggctcattgcttgttttgatgccgagggcgggtgagcgagtgggcgagatgatggcgagagagagaggggtgcgttagttgaccaggcccctttccgtgcgtgcgggtgagcgggcgtgggcagctagcaggcaggcaggcaggcagacaggcagacagacagacgcacgctgtgtgtgtgacctgtgaaagtgagggtctggagaagagtgctggactaggttgatcggctgcaggaggtgatggtcgggagggagaccagggcagggccggcagggccgcctcttaaaggggtccgtgggtggccggccggcagcttacgatgcgtcatgcctcgccactcgccaaatcgcacgccgtcgcctggcagacacgagagcctgctgctgtcagtcgcccgtctgctcagagagtcagaagaggcaagtgagagagtgtcgcaaggaaggcagtggccgccctccactctctcccttccgtcattgcctcgcgctgtcactcggccgatgccaactcgctgctcgcccgcccacagacaaccacttccgcttacggacgcagacgtgacgagaacaaagcggggtgcatgatgggggtcgtggcaggcatgaaggggagtgggagagagaaaacacaaggaggcgagcgagcgaggcagggcacgcccctacttggccgaggacgagaacttggtgaccgacttggtgccctcggagatggcgtgctttgagagctcacccgggaggatgaggcggacggccgtctggatctcgcgcgacgagatggtcgacttcttgttgtaggtcgagagcttggaggcctcggcggcgatgcgctcaaagatgtcattgacaaacgagttgaggatcgacatggccttgttcgagataccggtgtcggggtggacctggaaaaggagggcagagggtcagctgctgagagggagagagcaggaggctcgcaccgcccgggaacgcacctgcttgaggaccttgtagatgtacgacgagtacgtctcgacacgcttcttgttcttcttcttcttctcgccgtctgccttcggtgccttggccgtcgacttcttggcaggagccttggaagcgggagccttctgggcaggagccttggaagcaggagccttggaggcggtagtcgactggggcttctgaggggcggcgggcaagagcggtcagcaggaggccgaacgcgaaacaaggacgggtcaaggacggggcgcacggggggcattgcggataaagtcttttgaggttggtgggcggtgggtggcgagacgggtcgggagggcaggctggcgggtaggtggctggtaagtgaaggcggccaatgcgcctggcatgcctgcctttgagggctttcgcgccgcgcgcgcgcgcgcccgccgacgagccacgacgcgatggcccctgggcgattacgctacacgtgtaggcgaaagtgaagccacgacgccctcgcaaagcgcgcgcgcgcgcctggcctttaagacgggccagccctcagccctcacccttctccccatccctacaccacccctactcagctcattcttcaagctcattcattctcaacccgtaagtcgtcatcagcagcaatctgccgtctgccgtcgtcttgccgcagtcactgacgtcttcctgtctgcagcactctccaacccctcaacactctcatcaagatgtcaaccggtggcaaggcttcgggcggaaaggctggcggaaaggtcggcggcgaggccgacaagaagtcgtcgtcgcgctcggccaaggctggtctccaggtgcgtcctcggtcgcctactgtcgtcgcatcgcctgtcgctgaccctgcctgcctccgacgctagttccccgtcggtcgtatccaccgtctgctcaagaagggcaactacgctcagcgtgtgggtgccggtgctcccgtctacctcgctgccgtcctcgagtgtgcgtcctcttgcatgcctgcctgcctcacccgccgtcgtcgctgaccttccctccttcaatcggcttcagacctctcggccgagatcctcgagcttgccggcaacgccgcccgtgacaacaagaagtcgcgcatcattcctcggcacctccagctcgccatccggaatgacgaggagctcaacaagctcctcggccacgtcatcatctcgcagggcggtgtcctaccttcgatccagcccgagctcctgcctgccaagtcggctaagtcgaagtctgccaaaagccaagacgtctgagcgcgctctctcccgttcgctcgttcccttcggcctcagttctgccttgtctccctctcttgccacgctctccctcctcccaccaccttgatgattgcaatgaccccactttccgctatgctgcctgtcttatccgcgcaagaaagggccctgcaatggaaaggtcaattagcctctcgaccgggcatagcaccgtctgctagcatgttttccttcttcacccgctcgccgcgccctgctcgcctgcttgtcgtccgctcgacggccggctgcttgaggtttggcgtctcgccctccgcagtcgacgtcgctcgctcagccgctgcgcagcaggacgagcgtcgacggctccgatcgacttcagcccgtcgcttcctcccggccgaccacgaccccgcttcactcagctggactccaggtcaagtcgcgctgttacatctctcgcaagcttccttgtatagtttgcaggtcataggctgaccgcgcgggccgtctcccgcggtccatgccgctcgcaggccatgcgagcagctcctcgaccagagctcaacgacctgggctcttccctgggcggcgcccaaccttgaagccgccggcctcagcggcgagctccagccagcttgcttcagaacctccgactccgaacaaggctgccatctcgtcgggcaaagacgtcggcgctgggtccccgccccggccgcagatgggccgactcgccagcccgcccgggcttgatatgtgcgtcctggccgagccaccctcgtcgacctagcattgagctgttgctaacatgccaatcccctgtgatactttccagcgtaccgctgctcgacgcctgtcatcggttgcaaaccgagtcgagcccgccagccttcggccgtctcgcccaaacgcacgcgagaccatcatccgctcaggtgagtgatacattccatgttctgtccgagcaggctcgagcgagacgagcggaaactgacctatgtccgtctcgtcgttcggaactcgcttcgtctcgaccagcctacgctaatggccctcccctgctctcctttcgcgtctactcggcttcatgctgctctgctcgataccgcctccgctgcagttgtcgcaccgccgggcaagactaatcgagcgcgcagatgccggcgatgtggacggtgcttgcggcgttgaatcgacctgcgtcgacggccgaatccgcggcggtcaaggtcgtgccatcggcgtcatgcttattccatttcgctcaccatgacctgcccacgctctccttggctgacgaagcctatccgttgcacctggttggcttgcgctctgccctgtcgcggtcttgacgtgctgcgctggggcgcaggtctgacgactgattgaccgacgttgggcacgcgctgaaacggctgtcgtccacctttaatcctcatggagtcgtgcgctcgttttcagagccgctcccatcaaggagagatggccctgctgtaagggtaaatggccatcccggaagagccttctcatcgtaagacagatgaccgagcgtcgttcttcctgcgatgagcaatgacccctggccattgcccttgctctcgttgaagaagggattgacccatcttccctgcaacgaacggtcggcctttccgcctttaatcaagctcctcgtccgcagagggcatgcagcctctgcgacaagaaaccacctgctagccgtccaaccggctttcaagctgtaacagacgacctagtagtctttctccttgcaacaaagaatgacccgccagccaatatcagagcagctcgccaatgtctgagcaaccttcggttaagccagatggtcgactttgagcagcgactcccttgggcctcgcacgtctggcgacaccaaactcgacctttcctttgacttttgagaaacagatcgtgatatttcaacctgctctcaaccaggacagatggccgagaggttgggcgtgatcctggttttggcagtcgaggagggtgtgcacgagtgcaggccgtgccgagactgagggcgtctcctctccggcgcctctggtacataacggcaaaagtcactctagatgagcctgacgtgggtgtagttatcggagagccttccaggcggccatgttagaaagccctgggtccctacatgaattgggcattgttgactgtcacagtgtttagtagtttgggtcgatatgacggcgtcatgtgcagcacctcggtgtctctttgccccccaaccgtcactggtccgccgcaattcaaacagatcgacaaccgagcacaagcagcggacgtcgaatgtcgcacgctgccgatcgctcacctcgtccggcgtgactggcagaggattgaattcgggcaccccctgctctctccgtgaccgcctttttcgttttttcttgacttatgagatacacacagcaaggcccgaacaggctcttaatcaggacagatggccgagtggttaaggcgctagcttcaggttaacaaatcactttgatacgctagtcttaacaggcgtgggttcgaatcccactctgttcaaacttttgccggtcaagcggacgattttcttttgccttcttccggcggggggttggagaagagcacgcgcgccggcgctagcttcaggcttcgacttgatacactagtcttcggcagtgaacggaaatctaaatctcgctctgttgacaacctgttgccggtcgggaggtcgggttccttgtgatgcgcccgccgctgtcgggggagcgtcgtcccttctcagcctctttgccggcgatatcataggacagaaccatctgacagcgccacccgacctcatgctctcgtctcagctcgagccaagtgcaccatgtgccatgagtcgttgttcaagaagttggcgacctgcgcgcgcgcgcgcccaggtttgaagccccggttggggtcgtgtcactgactgccgaacgataaagagctgtctacgacggcatcggttgcctgcggagctctcaagtctgcttggctgcacaggatgacggcggcaagcagagggttagcatgtgcaagcttggtcgaacgccgccgagagcccgtctgacatcgagggacacaagggtatctggcgtacatcggcccgctttgcatggatgaaggggtactcggtgcatcagtgatgtatatgaagctcgttcgccctttcaactttttgcagtagacattgtgatggtttataatctgacaacgctatcagcaatcatccaaagtctcatggtgtaacggttatcacttaagtctaacaatctgttggatcacttacgaccccagttcgactctgggtgagactatctttttgctgttcttggcctcatggcgtccgcggtcatgccggacgacctacagccatcccattcagtcagctgcctgccctacgtccattttctttccgttgctcagtcagcagctcagcaggactcctttcaatggggcgccatccaaattcgaggcgcacctgaacgacgtcttggctcgcccgtcttcggctaacgagcacggatctctgcttgaccgcctgctcaccacagagagaaggagaagtccgtccccaagtcggcggacttatctcggttcagacgttgtcttccatcaggaaagagcaccttgtacttgcaaggaagtccagtacatcgcaaggccccttctgcggctttttttttttttcgttcgcgtcaaaaacgcgacacaagtgaattggatcatgagcgggaggcaaaagcgcgggtagcggacagtttcattgatctgaagaaattgcaagagtcacgtgtgattgtctgctgttaacattgctgacccggccagcacgtcgtctaagtacaacaggtcggatgttgaagctcctttctgctcgatttcggtacctggattattggactcatccgataagtctgactgcctcgcatcagtgctcacctggttgctcttcttcgccagccgtccacagcagcagcctaccggacgtcgccgggtcgggacgatgtcgagcggctcggtcccggtcgaggatggcggtcaaggatggacttgtcagaaaaaaaagtgttggtcggtgtgtcaggctgcgctgacgtcgaccgacttcaatttaatgagtgtacgagcatgatcacgaagcagaagaggacgacctcctgcttttgagaggtatcgccggcgacgctgacggtatgctggccgcttgccatgctcgctttcggcctggcggaacgactgacgcccacactttacgacgcgagctagcagagtatgatcggaggttcgacgagtgttgccggcctcttaacggctcttcaagaagcagtcgtgtcaagaagcagtcgtgagaaagaggtgctatgaggacacggagcaaaagaagatatcgccgcggggaatcgaaccccggcctagtgcaagttgccagatggcaagcaccaatgaataccacttcaccacaacgatttgatgacagccggtttaagtcacataaacagtatcgtagtttgccagacgccgtcatcgctgggcatcctctgctcgcattcaggcagtgtcctataggtttgatagatcttctgccgtgtactgatcaaaaggtcaacactctcactgaccgcctttcaaggtcgagccattagaagacgcagctgcacaacggttgcatcctaatccgacgcagtcgagcggcggcttggaataacaagtacaaaagacagaccctgagatgttctcagccaggagctaaggctcaggactgatgacctcttccgcatttctactctctgccggcgccggacgtcgatggcgatgctctctctatcctggtatctctattctggtatctccctcgactttggattcgaccttcctgaccgatgaccatcgggtggtgttgcttttactggccagttccagccgattgacatgataagaccacgataagaccacgatacgtacgccagattttactttgccgactgacgcaacctgctgccttgaaggccctcgatctcaaagcctgctgtgtcggcagccaagggctcctgcgagggattgtctgatgaccgacatctgaccggcgaaagggcaaagagcttggatcgagagggcccgaccgagtcgcagcctgtatttttcttgacatgacgcccaaaaatgtccaaaaaggaggtgctctcgagccgggaatcgaacccgggtctcccgcgtgacaagcgaacatcttaaccattggaccacccaagatttgatgataacgtctagcggtattaaaatatatttccgtttaatctacaatcgaagcagcgccgagagcaagctaagcgccgcgttcgcattcctccggcctaaggcgatcctcaagttatcagcgttggagatgcacctctcgcttccagtctggtgcccgtcaggtagggtgggctccaaccggcctcccgactgacttgctcaccgcgcatctggcggaagtcttgctggatcacgcgagttcgaaaggatgggtcccactgccccctgttcccctcgcatcccctcgcgctcactccgccttcttgccgacaagaaagccgtcgagcgtgcccttcttaggcgtcttggttgcctttctcgccgttgcagtccctgttgccggcttcttcggcgtcggtttgaagccgaagcgcgagaggtcggccgttggcttttcgtcgtcgggagcaggagtcgggtcgatgccctcccttttttttttgattcgggggagtcgcagaaacaggagggcgtcagaagacgtgctagagtggagagtggaagggtcatcggcattcactcctcgtcgggcttctcgccgggcgtctgcaacaggaggaggaaaagagttagtaaatcaaagcacttgtcctcttccgctgtcaggaagggaatgaaagccccaccttgaagcgagcaagagcacggagcctggcctttgcatggtcgacgatcggcgccgggtagccgagccgcttgaactctgcggtcgagagcgtcccgtgcgggtcgtagagttgcttgcccttaaggccggcgagctccggaacaaaaaagcggatgtagtcgcccgtcgggtcggcctgtgtagtcaaaagattattcgagtcagtcgaactgctgtgggaccggcccaggacgctccgggacgtttgcataccttggcgctttgagaaacgggtgcaaagatgcggaaatacggcgccggatccgtgccggttgacgctacccactgtgaaacgagattttgaagggattagcagcgatccactctcgctgccgcgttagatgcgaaaaggtctgcgcacctgccaaccgccattgttcgcagcgaggtcgccgtcgatgaagcacgtcatgaagtggcgctcgccgagccgccagtcgagcatgaggtccttaacgaggaagctcgacgagatcatccgggcgcggttgtgcatccagccttggctcttgcactggcgcattgctgcggcggcgggttctcggaagggggttcagcgagcgggggatgatggcaaaggcaagtgaagcgtgggacggaccggcgtcgacgatcgggtagccggtcaggccgtccttccaggcttgaaacgtcgccgggtcagtctcccactgcaaatgtcggcgagcaatgtcagtccaagtcgcccgaagcataaccaagcggcgcagaaaacccacttggatgccgcggtacttcgggttatagggctggcccatgccgaccctcggaaacgttgcgaggatgtggttgtagaagtcgcgccaggcaacctcgccgacccacatgccaaacggatccttgcggtcggaaggcagcgactttgtccctgcggccgccttgatgcgattgagcacctggcgggcgctgacgatgccggacgtcaggtatggcctggagaaggagtgctgaacatcagcgagcaatcgccaagggctgggggagggagcagacggggccgacgcacgacagcctcgaggtcgagtcgatatcggcccgatcgcgcgactcggcatagtgcccgacccggctggcctcgctccctctacccttgccctcctgtgcgccgtcggcgagtggcgaggacgagccgatctggctcttgcgcggctgggtcgtcacgaaccgctcgaggatctggcgcagagcaagacaagccgagtcagcgtcagaagaagggagcaggcgcacgcatgggtggaggaggaccgaacctcgagtgcagccttatggccaggcgggtacagcttgcgcatcatctccttatcttcccgttcgagcgcaaaccccgcgacctcatccgggacgtcgagcatcgcgccgagcgtctcgtcgccgacgagctcgtcgaaggctttccggtcattggcggccggaggagaccgttcggcgaggtaggtctctgggtcggcgttgactttggcgacccaggtccggaaccaggggctgtagatctgcaggggcgggaagagagatcgacagctcgataagccgatggccgggagccttttgagcgctcgtatggcctgagtgaacgacgcacggtgaccattcccccgcccttgcccttcttctgcacaccccccggctcgaggacgagcctgtcatgcacaaacgtcacctcgacgcccctctcccgcccaagctcgacgagccggatatcccgctcgagctcgtcgacctcgtacgaaagatttgcgaagagggcagttgcggagagggcgggcgaaagcacgaggtcgagcagcttggaggggaggtgcttccgcgggcctgggttttggaggatgacgagcgggatcgagagggccgcgagttgatcctagcaacataaacggaaagggtgaagggaataagggactatgcttcttgatactcaggagttcaagggggaaagcgtaccttaagcacgcgcaggttgcgcaggactaggtcgatccgccgcggcgaccgatcgtgcgcacgatagtcgcccgggttgaccgcaaagacgacaacgagcgggaggcctgccgactgcgcgtgatcggacgccgcagagagggcgcgattgtcctcgactgccgggcaaacgggtggggtgcgatgcgctccttgtcgggcgtcgtccgaggctgccggagccgggcgctgaactcgagggcctcgcggacggtcgcctgcggcaggtggacgtcctgctgctcgcagtagccggttgtccgggtgaaagagattggcagaggcttgccctgaaagagaatctcgcccttgatctcgccctcgtccttgcggccggccaggacatccatgagcgtcgtcttgcccgcgccggacgagcccatgagagccgtcagctcgcccgcctaccaacagagaagtagcgagtcagccttcaactctttcaggcgaccagagatagaccagagataaggctgaagctatggctgcgcaccttgcagtagcccgagaccttgttgagcagcgtgacgttgttgccgaccgtctgtagcacagagttgaagcagagcagtcagcggtcgagtcgcagcagtcggaagagacgggcagacgcacataggtcaggtccttccaggtgaagacggcgtcggccgactcgatgtcgccatcctgcttgccgtcctccttcttcttgccagccttgtcgccattctggccctcgcgcgagttctggcgctcagcaatcgtgcgagatgagccggaggaggcatctccattgtcggcctcgtcaatctcgcgctcgtcgttggaggcgcggtcgttctcacgctcgttgttggaggagcggtcgtcgttggtcgggcgcttctcgtccgaggacgagccctcctgcttctgctgccggataaacttcttgcctccgccacgcttgtagaggaggacggactctgtggcaagcacgcaagggtcagtcggcagtgcaaacattgcgtctgcgggcgaatggcagactcactggcggagccggcggcaggcaggcgctcgacggcaatgacgttaatgacgcagaaggcgatccacattgcgctggagggcggggcttggggtcagcctttggacaaagcgctggaaaaagggctgacgggccttacatgatgatgccgaggttcctccagacgtgcgagtagctaaaggcgagcgcctgcgagaggtaggcggtaccctcgatctcggtcgagccaggtgtcgaaccggccatggtgcagccagcgttgccaccctggtaggtcgggccggccgggaccgtcatgtccatcgagcactggtaggcgacgccggtgaattcggacgccatgaccgcctcgaaggcctgcgtagatggccggagcgtcaaagatcagcacgagagcagcgtcgccttggatagattaaggggcttgcgtaatagatcgggtcaatccaacggatccaccccagccagggcttcatctgagggacttgaatgactgaggaacaagaaaggggcagcaaaagaaaggggcgccgcagggaggagcgcaagcagaatgcgcgtcagggtctaagtcacgagagcaacgctgtctcaaagacaggacaaaccgtagccggcataagtgacggcgattgagaacgctaagccagagactgtcatcggtaaccacgttgctcgagcgggcgtcagtatggtaggcgcagctcagttcgcaagcgagcgggggacgcacccttcgacgcgttctggaacgtgctgaacccagcgccgatcaagcggaagaaggcggtggtgcagacggtcgtcgcaaaggtgaacaagaggtagatgaagactgacagaaaggacgagggtagagggagggtcaaccttgaccttggttcgcagcgcagggcgcgcacaatcgcgagcaggacgaacagctcgcggccgtctgcttcaggttcgagaggaagaagatgatgacgcagaagatcgaggtctgcacgaagaagatcggcactgcaagtaggtggcgtcagcttatggttcttgaggaaaggcttgcgggcggtgacgtacggtctgtgatcgtttgcgcaaagaagagtgcggcaggccggtacagactgaagcccttgtgctttgcgaggattgcgcgaccttcgaaggcagccgtcgtctcggagagcgagatgagcgaggggaagaggatcgacaggtaaagcgttccgccgcggaggaactgcaaggccggcgtgtcagtcgctcgtgcatgagaaacgagagcgaagcttgcgaacgcacgatatcactggtttccgtctgcatgttgtagaagagcgagccgacgacaaaggcctggatgaaggtcgtggcctgccgggcccagaacgtcctgtaagaaggcaacaggcgacaacgtcagtcgccaagaagacacagcgggacgagacttgcaagtgagaggacgcaccacttgtcgccccagcgctgctgaacctcgcgccggagggcgatcatcgtttgggcgccaaggtcgcggacgtgcggctcgcgcttcagcgcgcccttgtgcttctcggcctggattgccttttgcgcctcagccgtctggcgctcgacctcagccatgttggcgaggtggtcgtcgagctccttgcgcatctcctttgcgacgtccgactcgcggtagcgcttggcaaagtcgtcgatcgtcggggggatcttgccctcgccgacgcacgacggccggagacgggtggcgtggttgacgctgcccgggtgctccctggagcctggggtgacgcccgtgcgggcgaaggggtgtctgcgggcactcagaggggccatccagttgtcatctcggaggatgagacggagagtgctgaggatagtgaggtcgagagcctggcggggtcggacgctgcgggagagggtgatggttgggcggaagggccaacgaggtcgaaacgccccgccaaaaccagccgacctgcaattcctcgaacgagtacgacttcagcctcgatacagacggctgacctcatcggccagacacgcccgccggcacgccggaacccagcacgagagtgcagattacctgcgaggctgatgcaaccgtgggccgcccactcggcgacgtcgttgcctgccctgccgttcccgtcgccgccacctccgccgccggagaccgaaccttggacctacgctgaggccataaggtcgccccaggcagagtgctggagggaggcgttggagaaggagatgcgggcgctaaaggaagcacggacctttgagctggccgagcgtccgccaggcgccaaggtcgtcgggtcgaagtgggtttacaaggtcaagcgcaacctagacgggtcagtcgacaagtacaaggcgaggcttgtggcccagggcttcacccagcagccttgggagtacggcgagacctacgcaccggtcgtcaagggcacgagcgagcgcgtcctgctcgccctctcggccgcctgggatctcgagccgcacagcatggacgtcacggctgccttcctgcacggccagatggaagaggaggtctacatcgctcagctaaaagggtttgcggtgtcaggccgagaatacgacgtcgcccgcctgacgggcaacctttacggcctgaagcaggcaggacgcacctggtggacggcgatgaacaagactctgcaggggttcgggttcaagcggtcagccttcgaccacttgctctaccaccgaagcggggcggacgggctagcgttggtgggggtctatgtggacgacctcacgctcgcctcctcgaacctcgccgccctgcggcgcttcaaagcccagctctcggcggtctacaagatgacggacctcggcgagctcacgcacatgatcggcttgaaggcgagcgagaccgggcccggcggcggatcgaggtcggccaggagcacaaggtcaaggagctgctcgaacgatggggcatgtcagagtccaagccaaacaaggtgccgctcccgaccaagaccaacttgcccgccctcgacgccgcctcgcccgaccggctcccgccggccgaagtgacgccttaccagtccctgttgggctccgtcaactacctgtcggtcatgaagaggcctgacatcacccaggccgttaactatctctcccgctactaggcccatcctggagcggcgcacatggccgccctgaagggagtactgaggtacttacggggtgcgccggctgtgaggttggtgtacgaaggaggtaaaggtcttaagggcttctcggacgccgactgggcaaacgacgcgggcgaccggagctcggtcacgggttacgcctttacgctcggcggcggcccggtctcctggcagtctcgcaagcaggccaccatcgctcgctccagcaccgaagccgagtacatggcgctcggagagacaggcaaggaggggtcatggttcaaaggcctcttcaaggagctaggcatcaggatggacggcccggtcccgattggcggcgcgagccaggacgatgaggtgctcgagctttacggcgacaaccaaggggcaaacgcgctcgcgcgtaacccgctgcaccacccgcgcaccaaacacatcgacgtcatctaccactggatccgacagcgcgtcgaacgcggccactttaaaatcacctacgtatcgaccgaccagatgccggccgacggtctgacaaaacctcttgctgcgccagcacaccatcgatacggcgacctgctgtgtctcgccgggcggcgatgatacagaggtcgcggggaggtgttgaaggtgttgctgcgccggcaccggctgggcgcagcgcgggaacctgggcgcgccgccagcgcctggcgaccgcccagcggccacccgggcgccacgccctggagtccgccggactctttcctcctctctcttttcgctccctcctcttagctagacgaccgctcgctccccctcctaaacctcagtcgttcacggagtagtcctgagactgaggtacgttcgcccccccaagtctagcacccctttagcctaggcagtagctcacacccactgtagtcggccctgcctcctgtctcgtcctacaggtgggatccatgagtcgttcacggagtagtcctgagactgagtcggccctgcctcctgtctcgtcctacacttgggagtacggcgagacctacgcaccggtcgtcaagggcacgagcgagcgcgtcctgctcgccctctcggccgcctgggatctcgagccgcacagcatggacgtcacggctgccttcctgcacggcccagcccttctgctcgaggtcgacgacgacaaggcggtcgtcacccagcgggcccggtgcgacaaggccttcaacactcggctcgaacgtgtcctccgtcgacttcctcgtctcgagcgcgacactgtctccgagtccggcacggtcctcggtcgacgttggctcggtatcgtccccttcaggtcggtgctcgagctgtcggacgccgaggtcgcttctggtcttcacttccggacgctttgccccggctcgctcgacttctgcgccgactgtggcgacgctgctccgttcggtcacgacgaggcctgctcgggtcgtgctccggtcgctctcggtcgacacgagcaggtcaagcggcttattaacaacaccctctcatcaaacatcaagtttcgtgttgttctcgagcctcttgtccctggcactcagcttcgaaccgaccttcgcatcaccggtcccgacggtgtccgcgagatcgacatcaccgtcgtctctctcgcctcgcaagacgcccggtcagcctctgcccgcgctcactcggacccctcgctctcgttcgccctccggtctcggaacgccgtcgacgacaccctcaccctggccgctcggagcaagaccctcaagtacgcaggccggatctccgctccttttcgtcccttcgtcctctcgtccggcggcgcggtcgaggccggcaccctcaagctgcttcgcgcctggcaggatgtcctcgccccgtcgtccttctcgcacctcactcgggtcctctctctcatcctcgtccgagctcgggcccggctcggtcgactctgatcatccggccttggcctctgcctggttcaggatgacggtcgctcggtcggtctagccttgatcgcgctcgcccgccttcgtctgtttcatctctcctttgtctcattggctcctctctcttccgcatctgttccgctccgtcttccttcacttccgcttccgcacgcccgcttccctcttccgtagctcttcctctcgcgcctctcttccccctctcgacgactcccctcctccgaccactctacccctaggcagccgacccgaccctaacccgttcgtctctgtgcccgtcccgcctcttcttgaccttgccttacactattcgatgctgcagtaaccctaacctcttccgcgtctcttccgctccgccttccttcaccctccgcttccgtgtgccggcttccatcttccgtagctcgtccctccgcctctgtctagccctaaaaaaatgatatgactaatgggtttgactttctggcaagtgtccgatagatgactgactgttggaggagagcaggcgtcgacgcccgagagcgagttccgtgtcaaaaaggcgcgatgcaggatttgaacccacgacctcctctatatccgatcttaccgggggaacgacccgaaagaggtatgataccactacaccaaccacgccggatgtcagacatttttgaaataaagatcggaatgagacctaacacaatcagatctcctcctaaccccatgaagaccccccgccgcttccctccgagccgccatctcgttcccgtcacaaacgccgcttcgaccccttttgcattcatgagactcgttatggcggatacggggaagtactggccggagagtcgtctgatgtatgcgcatcggagccggtggtgctcgagtggcgccactaacactgcgccttagccttccgaggccgcacccgttcacgcttcagctgtcgggagacgagctcatcttgccccatccaccaattattctgtctcccgaccttcgacaagaactccaggatctcaagatagtgtgcattctgttaccttagtctatccgcgcccgcacaaaagaaaaaaaaccttctgttcaaccaatgagcaagaccagctcgagggcccgcacggcccagccaatcggctgctccagctcgcaaccgggtctctggccgcctgtcagccagtacgcaatcattcctggctctagaggttgaatcaagctctctttgcctcagtgcggaccctgttcacgtccctggcttggtttggtttggaagaatgtaatttttcaaagcctcaagcgccggtttacggcggaccgcctgccgccttcagcccggcgccagcgccttccatctcggtttctcctcgcggctcaggccatgtaactgacgctctcttcctgcgtacagcctgctttattgcccgagccgatgtatcaccggccctcttcgtttgccaaagcgttcgcttcgccgcaagctgatcctgtcgccgcgccgcccccccccccctccccggttgtgcctgcaggtgaaccctggctcctcccttgacttcctccagcacatcgtccacctcgacagcaagacaaaacgcgcgacgcccctcgccgaggccaagcggcggttcgtcgtcacgcccgacatggatcggctgctcgcgctgctggcggcggagccgaaagcgggcgacgtggaggcggtcaagaaggagggggttaagagtgaagtggggctcaaggcgatgcaggtcagcgacgacgacgattgatggctctctctcgagtcgtgtcaacgtggccgccactcgtcatcaggtcgaacccgatccgattcaaaagagcgaacgtggagcgagattgcaacgtcatcccagatcaccctcccactctcttcctccccttcaaagctcctgcccagccgctagaagcccctcaggccaagcacgtgccggacgtcgcccgtgaagcggagcgagtcgagtaccggcaggaggtcgagcagtgcctggtcgtttgggtccgagaaccagccgtcgatcgggatgccattcgcttcatcggcgtaaaagagaggggaggggaattcaccagtctgcaagagaggaggagtgcgaggagaagtacgggggaccgaccttggttaagagcgtacgagatgggcgagttgtcgatgagcgcgaccgactcgaggtcctcgcccatgacggccaggtccttcatgtacgccccgttcgcgtgctggacgcacgactgcctcggaccagaagagcgcgtcggtcagcgaaggacacaagcagggcgagatcgggaggtcggacgcacgtcgcggaagagccgctttgcaaacatgccccggccgccgtcgagccagtcgatgactgggtcggcatactcctgcatcgaggccgtgaagatgacgagcgtgtaccagctcgagacctggcggggcgacgcgaggggtcagcctccctgagcccggctatcacagcgagggggacgtcgcaacgcaccttcttgagaaagtagtcgacgtaaggccgcttgtagacgtgatagacggtgctccgcccgccaagaaagacttcgaccatgtgcccctcgccccgtccacgcccgccgctcgcgccccggccccagcggccgaacccgccggcagcggcgccgcccgggccggtcgcggccatcgggcgcgatgtcgagtggatgagcgtctcatcgaggtcgaggatcagcgtctttggcttgtggaagggcgtcgtcttgcggacggcagcgccagcggttgggctcgcgaggaggctgctggggttggagccgtcgaacgagcctggcggggagagggaagaggaggagggccgggcggtcggacggaggagcgtcgtctggcccagtggattgtgcaggagccgcgagcgcggcgcgacgatgacggcgggtgcagggatgacagcctcttcgtccgacgctccgctgtcggaggatgcggctggcggcggcggagggaggagcgcaaaggtcgggtttggggtagggagcgacggccggaggccgacgacgatgtctgcagcggccgagcaaagagcgacaaccgccgggtcgacggcctgtattcgagggtcgagggcctgcgtcctcgggtccgggaatggcacctcgcgctcatcgtcagcgtcagctggcgtaggcgggccggttgacgccgcgcggtcgtcgtcgtcgacgaggaggtgactccggaccattgctgctgccgctgctgctgctgttgttggaaggctcggtccatctgcctcggtcgacgagtcggtttctccccgcctcttgacgcccggtcgactggcaccgccgccgaccgccgtcgccgctgcggccgcggccctcctccccgcggcgctgctcacagtcgttgaccggcctcttgcaccactcctgcccatcccggtcccaaaggcccgcatcccgcgcttgccagacgagaaccagagggcgagcgcgacgaggatcgcccagaggcggctggcgacgcgagcaggcagccagcggcgctcgccggcaacggcggcagaggatggccgacggcgtttcgcgagccggcgccagcttgcgtcaccgccgtcggcgtggtcattgtcgtcgtcggcgtcggacgatgctggagtggtcggagggcggagcgacggcggcgcgcccgaggtcgcccgccggcgaagcgggaccggcggaaggtcgtccgtccggcctacaggcgatggcgggaccgagcgcgagctgctgccactggcaacggggacgctgactgcgggtgtcgagctagctgagaacgcgacgaggcggctgtcaattgcgaacgacgacgacgacgacgacgggcccgccggcgggctgagcgaacgcgtgatgagccggtcaaggtggatgattgcgttcatcttgagacgaacgctagccggccagccaaggcagagggcaagacggtgcgagatgcggcctcgttaggctgcagtgggtgagtgggcgggagggaggaagacaggcgggcgacgatgggggggctcggtgctgaaacggcggccaagggcgagggggggggggggtcagtccagcgctgtggcacatgcggagaaggcaaaggggaagaacccacttgtacgactcggggaacaggttgcccatgaacaggtagtaccgcgcctttgggctcagcgtccccggccggcccttgaagcgcatcagctccgcctccgtctcctcctcgaccgggattcccttccgcctcgcctcccactccaacacctgcttccaggccacctcgttcaggacgttgtggacgaagaccatcgagtcgacgtcgtcctcgtccgtctcaaaacccttcttgacgagcgcgttgtagaactgctgggcggaagggtagatccatttcggggcggaagacgggatcgtcgggtcctcgtcggaactgagcgtgcgcttgatggacgagatttcgcggtcggtcgaaagggtcgcgcgttgcgaggcggagaggggcgtttgagaaaggacgggcatcatgttgagcggcgagaggtcgtccgacgacccgccggcgccgacggccgtgtggtcaattgggcacgaggcgcctcctcctccaccagctgaggaggccgaggcggctgaaggaggcgggacggccgcagacgggtcgtgcattgggcatcctggcggagggagcttgcccatcggcttgggcttggcaggcgccacgacgggagctgcagctgctgctgctgctgctggcggcggcgagcctgggctagatgacggctggtgcatcgggcacccgggagggggcgtcccgctcgcggcgttgccatgcgccgccgccgccgctgacgagagggacgagggcgagccgagcgggaggaagtgggagggcgggagccgaaccggctgggaggcgtcctgacccatggcggcaaggagaagtcgtgtgtgaggatccgaggtggtggagggtttcgcggacaggcggatggagcagcaggtctgttaagaaataaaggtcaaggacctcagcaagacgctctcgacggcggctccagcctggccctcgtggaaggctacgtacgagtccttggtaggatctgagggtagggtcgctgtcgggtcgggtcgtaggtcgtggtcgaaggcagtggcggcgacgaaactcgactcccgattcgcccaagcagccgagacccgagcctggggacctttgacctcaaggatcgaccatcctcgacgactcggctaggatgcctgaagctcaggacgtgcgctgggactgcaacgagacgatctcgcatgccgacttgaggtgtcactcgctccggtcgggcaagaggctagaggacgggcgggcgctgcgcctcggctcgctaagcagcagagccgaccggctgggaaggtcagggagggacagcatgcaagtagctcgtccatcacagacgggcatcagtgccagcagacattcctagctgagagtgcctaagagcgacgagcattccgaagaaagtcgtcgagcagtcgaggaagagtcgtcgagcgcaccgtctggccgctggtcatcgtctctgcgccggcgcgcgtcctcttgagctgacggccatctcgctcccttccctcccctgacctctactagcctaaccgagcgtcttcgcccaagatggatcgacttgccgtacgtccgcccagtctctggcacacgctcagctcccttctagacgtagaccgacaagcgcgtacgaattgaacgaggaataaggggggccatcaatcgacccgaccccttctccccttccctttgcctagcctcccgtcccgtcccgtcccttgccatcagcttacaccttccctaatcgccctctaccaagtcgctcggcgagcagctctcgcagatcacaatgtacgacctcaagtcgtacgcaacccaggccaagaacctcgtgctcaacgtccccgagatggaggcaaaggtcctcgaggcgaccaacgacgatgcgtggtgcgttccgtcgtcgtcctctcgctcctccctcttgccttgctcagaggaggtcgtgagcgaactacccgggtcgctctcgtgctactgctgggaccttacttcagagctcgcaagagcgggtgtgattcgctcgaagctcgagggggcggtcgataacccagcaactgaccgcccccgcccctcctgctctcctcgtcgccctgtcatcacgcccttccctcgtcatccgtcccgatcggccacctggcacgttcaatccgaacaggggcgcaagctcgtcgctcatgcaggagatcgctcaggggtgcgtcttcgctcgtcatcctctcgttcacctctggcttcgctagcctcggctcggctcggccgtgcgccgacaacgacgccacgcccagcagtcgtcgtcatctgtcgtccgacaagctgacattatctgcctttcaatctggacatcgtcaaccccaccgctgccgcttgtagaacgttcaacttgtccgttccccctttccttcccttccctccgtccctttcatcgcctgctttcggcccgagcttgcccgatgagagcgtccttcgtctaccgcctccctgctgcggcacttccgccgccgccgccaccgtcgatcgacgcccgtgctggtcgcagcaagcttggcagaagtgcggcccagcgagagccaatcgctctctcccctccctcttcctctcccaaccactccttctctccaacagccgctcttccccctctcgagcgcagaaacgcaccgcgtcaaccacagcagcccctcggtcgccttgcgccccttgtcgcccggcttgccctcgttggcgacaagcgcctcgagcgtcgccgacgcattctcgtgcgtcgaggcgcggaggcggagtttctggcgaaggcggcaagggtggagtgagaggggaagggagtcagtcgactacttgcgtggtgtgcgtgcgtgcgtgcccgcctgtcgagtgcaagcccctcgccgtcccaagcctcagagccttgcctcgcctcgccttcccaatcgccaccgacgctgctcatggcaaacgctccactcggagccccatccccgggttgagacctcgcgcagtgttggtgtattgcatccaagagagaacgagcgaagggagaaagagggacggactgcaatgttgccgttcaggtcagccttgacgagcccgaaggcggtcgagccgaggaggtctgtcagccggccggccgggcggcggacgggagcggagggacgggacgggaggtaggcgagttggggtagaagcggaaggagatcaagccagagagaggggttcagcaaacagtcgatacgcgtcgccccgccaccgcgctccgccaggcaagcgggaggccgttcgtcgcaggacgaccacccatacgaaagaaaggaggaaccgtagcgcacgcaccaaagacgcggacgaggccctcagaggcgagcaggaagcgctcggtgtcgatcccgccctcagtcgggacctcctggaacttctgcgggcgggcgtgcgtgtgtcgaagaagaggaggatgggcgtcaagacggcaatggcggaagtgcgggcgggagagcaacaagcggacgaacgagcgggaccgtctcgaagaagtttggcatggctggcgatactggctggttgatacaagatggtcgacagcgagagggagccgcgggccatctctcaatcatacccttttttttatttctctctgagagtgactttcgactcggccggcccgcagcgacccccctcctctgaccgtcagtcctcgctcctgcaagcatgtccggcctcgtcgacccgtccgagcccgtgcccgtcgtcctttcgcccttcgacaaggacaagatcaccatcgtctgtccctcctttctcgccttccctccctccctgagactgaccagccctcgcgcttacttgcacagcttcccggcgcaagcccgacgctcgacgcttgcacattcaacgttaaggatgaggaccatacgcttgggaatgcgctcaggtggatggtcatgaaggagtgcgtcatatagctgttcgacgcgggtgtgccgagctagccgagctagctcgagcgctgggacagggcggagcagagctaggcagcgagcgagctgggactggcttgccccttgcctctcgccgctttcgcctgcctgccgagcgacgccctcgcaccagagctgcctctcaaccgagcaacccacgcctctcaagccagctcggtccagccaaacccttcaagcaactgacgtccctccctttctctccgtccgcactgctcgctcgaatggttagcccggatgtcgagttctgcggttacaggttgcgtcccccccccttccctgtctgcttccgcatcttctcacacgtatcactcggctagctcgctcgcatgcatgcatgcatgcttgcccgacgcgcggtcttggctcgaaaccaacgagcgcgtccggcccgcatcctgcctgcctgcctggccgctcgcttgctgcacacccgaccctcgcagcgaacgaccgccttcgccgccgaccctcctttctcgaaccctcgacccttgtccttacagacggatgaacaagctgaccctcagccatcttcctgcacctcctcaatccatcctcgacaccaacccctgaacgaacgacagcatgcctcacccgtcagaagcaaagttccacatccggatccagatgtacagtgcgtccctgcgtcgttgtcgtcgtcatcgttcctcctcgctcgccctggcgcctgctcttgccctcctgcacttgactccggtccctcgccgccccgggggccagagatggacccggtcgggcggtcggtcggtcgggcgttggctcgctcgtccgtggcccccctgcgccacgcttgcacacacatccacccacccaccctcgcgcgctccacagacacacgcccagaacctaattaacgccttccctccttcccccgcgcgcgtgcgcgctcgagcagacgggaaatcagctttgacgtgtctcctcaaggcgctcggtaacctccgggcgctcctccaaagcctcaaagatggctatgcgtccctacaccttacccccacctctgccccggccttccgaccaggaggaaccgaaagcaagaacagcgcatcaaagaatcagacatccattgtcagcccctgaggaactaagccgccctcggctcgagctcgcgcaggagccggtcgacgtcctcgtcctcctgcgcagccgcaagctcgtcgacctcctcctctacgccctcgaactcggccggcgcagactcgcggccgccaaagacgccacctccaccgctgctgctccggccgacggcgtcgttgacgttggcggcgccctcggcggtccgaaggccgctcgcgagctcgagctcgcggagcatcgctttactctcgtcaacctctccctcctccgggaagtcgctcagcccaagcttcctcctccgcatgaccatggcgtttccactgtaaacgctatcgcgcttgagctggtccgtctggcggaccttgccgacgagccactcgagcgcgccctggtcgagcacgaggtcgtgcgagcgcaggaggtcaaagaccgagaccgacgagatggacgcgagcgtcgcggtcggattggagcggagcgcgcgggggagaccgtcggctggcgggggggaccagggcgagtgaaggaggagaggtcggcggaggtcgagctctgcgagcagaacgaggccgggagggtgtcagcacggtgcccgaagctcaaagcatgcgcctctcgagtgtggtggggggggggggggaagggggcccaccttcaagctgcttcgcgaccatcatcgtctttcccttcccctcccagccctcgagcacaaagccgtcggcgccgacaaccttgagccggccctcgcggagcttctggctgagggccgtcttgaagccaagctgtcggaccttacgcgggaggtcggtcgaaaagtcgcggccgccccgagggccgtggcgcttgcctccgccgcggcctggtgaaagcggtcaaagagcggtggggtcagcgctggagggtggcaggcagagccttcgttgccgccggcgagcgacttacggattccgctgcccgagtcggcgacacgggcccggccggttcccttctgcctgtggagcttcctgcccgacccgcgcacctcggcccggttctttgtatgcgtcgtcccgcgcttcaagaggttcgcatggtggacgacgcacgcgtgcaggacgtcgcgccggagcgggaggccaaagatgtcgcgcgggagcggaacgacgttttcggccgcggtcgccgggggcgttcgggggtcgagcgaggtgagagggacgtagagcgggaagagaggcgcgtagggcggctggcggtcgtaggcgaaggccgagagcgggttagctgggaggaggaagggcgagaggagaaggttgtcaacgaacgtcgctcgagcagtttcagcttgcagacctcagagagcttcctctatagctcctctggttctcaagcagggccgaaacagcgaactcaccccgctggccgtcgacgatccggtccttcttcgggtcccggatcaagctgtaggtcgtccgccggccgagcaggctcggcgccttggccgtcggccggaggaggcctggccgggacgaggacgctatcggcagacgggcgaggagggccgaagccgagcggaatgccatttcccgggacagtaggagagggtaagggaggagggcggaggaggaggaggtcgatggcgtcggcggagaggtgtcgaggtcgagagtcgaggtcgaagtcgtcgcccaggctttggggaaagacccccgaagacgacctccgactcgtgaaatcgtacgcctaggcacttgcaatcaacgacgacaaaagagagtgagggggagtcatgaaagagaggtcaggtcaagagggcggagacgatcggtcgtacaaagagcggaaggccgcaaggaagagtcaaggaaagggtaaagggggaagggtgccagggccagagagaaatggcgacccatgtacgtcaaatcggttgtcaacggcagcgaccgactgagtcgaacgagaagccagaaggccggggcatgatggaacaaaagggagaaaagagaggttcaggggggtggggccctcactggtcgtcgccgtcgtcgtcgggcccagttgactccccctcgctcgggtcgtcatagagcagctcccactcgtcctccttcccaacgacgtcagggacagactcgacgtcgctcgctccctcctcttcgtcgttgtcgtcgtcggtcgtcgaaatggcagaggacgacgagactgaacgggccgacagcgccgaatgcgcgtcgttgaccgttgagggactgccgacgcttccatcctcgtcgtcgccatcgccgccccgatcgaagccagccgaggatgtcgaggctgcggacgaggtgccgccgcggtgcgagggcggcgagggcatgatgatggacgaggcgccgagggaagacgtcccgcctatggctgcggccgctggatccgaaacgacgatgctgattgccgccaaagagaagggggcttttcccctcccccccccccctccctttccgtagaaacctcagtccacttcttggtgactgaggtcagtttccacctttcgcctttttgctcaccgcttgtaacacgttctgacccccactctaggtagctcattccgttctgtccttcgctcaccaggtgcctagagtaatccatgctcagtccacttcttgatgactggggtagctcattccgtaccgtccttcgctcaacaataagttgccgctcccgaccaaggcgaccggagctcagtcacggggcatccttacgctcggcggcagcccggtctcctggcagtctcgcaagtaggccaccatcgcccgcttcagcaccgaggccgaatacatggctttcggagagacaggtaaggaggcgtcatggttcaagggcctctgcaaggagctcggcatcaggatggacggctccgtcccggttggcggtgcgagccaggacgatgaggtactcgagcttcacagcgacaaccaaaggtgaacgcgctcgcgcgtaacccgctgcaccaccccgcaccaaacacatcaacgtcatctaccaccggattcaacgacgtgtcgaacgcggccactttcaaatcacctacgtatcgaccgaccagatgccagccgacagcctgacgaagcccctcgctgcaccagcacaccatcgatacggcaacctgctgcgtctcgccgggcggcgatggagcataggttcgcgggggagtgttgaaggtgttgctgcgccgggggagtgttgaaggtgttgctgcgccggcgccggctgggcagcgcaagaacctgagcgcgcctggcgaccgctcagcggtcacccgggcgccacgccatagagtccgccggtctctatttttcctcccctctcttttcgctccctcctcttagctagacgcccgctcgctccccctcctatactttagtcgttcacggagtagtcctgagactgaggtacgttcgcccccccagtctagcacctctttagcctaggcagtagctcacccccactgtagtcggccctgcctcctgtctcgtcctacaggtgggatccatgagtcgttcacgaagtagtcctgagactgagtcggccctgcctcccgtctcgtcctacacagggcgacacccggtcgccatcggccgagtctagacccgacaaccctcagcggccggtcattctccggaaccagctccgccggcgtgagtcaccagctccaccggatcaggcagcagacacagcctttcagaagtttctttgccaccacactctagcctacacaaacccctgtaaaccttgagtcgccacttgaatctcaagcttacctcttcgttccccccatcactcgtccttgcccgtcatggctccagtctcccccctgctagccacttgtcccttagttaaggacgagcccacgccggtccgtcggcctcgtcggtcttccgctcctccgacgccggccgactggtccttcagctcgtggtccgagtccgagcgcggcgagcccgctccggtcctcgcccctgctcctccgactccggcctcttctacgacctctgagccctcgtccgaccactcttcggcccctgttgacgaccttgtcgaccggttcatgttcctcgttcagatcccgacggccgtcaagcctctcatcggctcacaagctcgcctctttgccaacgccgctgaccgactcgcctcggccttcgtcgccaagccatcgggcgagacgctgttcgacttcctttgccttcccaaggtcggcctcgtccctagacttcgggccgacgctgctcgccatttgtcccttaacacactgtcgccatgaggtgtcggtcgtacaggacgccaaaacagcgggcatgcgtttctttgccccatggctgcaacaaacagcgatcacaccgaacttgtgaagcaaaacaattgcacctacaagcagatatgtgcggttggttaactttccgtcggtcaccttcctgcggccgtcgataatttgggcgttgtacgaaacgtatcaatgtttggcgaaccgttggaggttgcccttgtgagcggcatcgacgttttttgaggcgatagacttgctcgtgtcagttcgccgcagccaacccaaactgctgagacagagggttctactaaagtaacggtctatcgtccggctctacagattcgtcgcatttgtcatcgctgcatcgaatggcgcttgcgatggtgcttgaacggcagacgcgtgtctctcttgccgacgcaggcgcggagctgggactgatgcgcgcgttgagcgaaggacggtacggagtgagctacctcagtcaccaagaagtggactgagcatgaattactctaggcacctgttgagcgaaggacagaacggaatgagctacctagagtgggggtcagaacgtgttacaagcggtgagcaaaaaggcgaaaggtggaaactgacctcagtcaccaagaagtggactgaggtttctaaggagcctgctgctcggcctgctgcttggcctctacatgcgttttgtggttggtggactctacggacggacgggtggctgagcgagtcaagaaggagcgtacagagagagcggaccgagagagcgagaaggaaaagagagcagagagagagcagagagagagcagagagagagcagagagaaagagagggcagagcgctccttttgagttgaagagagggaagatgacctcccgcgctgaccaggtgggtcggcgagcgaagacagacgtcggccgagagcaacaagccgagtcaagacgaccgccggcgagtgcttggggctgtgaagggcagcgtgcgcgtgtcggaggcatcggcgtgcggagagccggctcgagagtgcagaaacgaagccctggcactgagcaggacgtcgagccggcgtgatgacagcgacgggtctggagacgcgccgacggcgagagagaaagaggaccagaggggtcagaggtcagtcgccggggtctcgagtcgcgagcaagagaatccggaagacgcaccttttgacggtcaatcggctgaaaggaggcgagtggacagttgctcgcgagagcgcgggggtgagacgggtcgggggctcggatggcagacggaagacatcgggcgtggtctggcagagccaaagaaacgaggtcggtcagccaagtcgaagacgagagaagaagacggaccaagacgcagagagggagatgtactgcgagggacggtgggccggacgcaaaagaggaggcgttggagacgcacgacaggcctcggtcatcgagctcgcaggcagaaggtcggcgacggcggcggcgagaagtcgctcttcagaagatctcgtcctccgagtcgtcgccgtcagagcagacgctgtcgtcggcgaggcaatcgaccgggccgccgccctgcggctttgtcggcgtgacttccgagacagcaatgctgagaccgcgcaggcaagaggcgttcagacggccagcaaagcgcgagagagggaaaggacgcagagaggggactgactaaagctaaccccagcagctcctgatcggatgaccggggaagcctgcgtcgcttacaaaccggagggtgtacttcccggccggcatcaccggcgcgctcgactcgaccacagggggcgtctcgaagaagtcgttgtcaaggctgctccagtcgataggtgggtagcggctgcggtaggcggtaaggacggtcgtctcgtaggcggcggcagtcgaggtgaaggtcgaagaggagctctccttggccgtcgggatggcagcgcagccgacgaagcgactggcgcggcaaaggtgttaaactcgggcgcaggagccggcgcaggcatggtcttgttggggatctcgacgcggacggccggtgcggcaaagatgttgacctcgaacgagggagcaggcgcggtcaccggcttgccgggcttctcaaaaagaacagccgacgcgccaaaatcgaccacaacagactcgggctcgtaaatgacagcctgaaactgctgagccctggtaagttagagcagaaaaggggagaagacgggtcagccattgcaatcgggcagagatcacaggagacaaggtcgtactcggcaagaaccgccgcctcgcgctcggcctcttcctgctcaaagaccgagtcaatcgagtcactggcagagataacagtcggtcagtcgatcgccatcgccaacagccagctttgaagaggcaagacgagcaggcgcacatggaaacgtcctcgactgcggcgagcgagcgaccgtagaaccaccttccgccaggcggggtcatcaggtcggcaatcttgaggacatcactgagacacgaaaaagcggggcgggcaagagggccggtcagtcactcggtcagtcattcgtcgacggcggcggctgaggcaggcaaagcagctcaggccaagacgtaccacgacctctccatccgctcgatctcttcggcggccgcaacgaacgactccctgccgagcgcagaacgacagacgaccgaggggtgagctcacgagcagcgatgaaaccgtccgtcagtcgaaagagaggcaggacgtactcgtcctaggcagcagcgtcaagagcagcgtcgtcgaagacagcgtccttaaagataggagcttcagagaaggtagacccgaaggcaggagcctcaaagaggcggccctgcaagataggagcgacctcgacggcaggggtaacctcaacaggcacgctcgccctgtgcgaagcgagaagagagtcgaggcgatggtcagcaagaccccgagacgcagtcgacacagccagagggcccggtcaacgcaccggatcgagagacggacgtcgtcatagaagcgcctgtagctgcacgagcaagagaaaagagggagggcgtcgttggccggtcagcatggacacaaagagcaaaggaggcaagcgagcagagacatactaggcaagctccttgcgggtctcctcgagctcccccccccccttcctcctttgaggtcaagcgcgagctgacgctcatcggccgtcccttcgaagcgcttcttccacctcttccccccggccgagcaccgacgcctgctccggacgctcgtcgacctgctcgacacctcccatgggcccgcaatgatccttggtctccaccgggacgactctcttgaccggctcgacgacaccgagcgccagacggagggttcgcttgccggagccatcagggagctctgggacgaggagccctgtcggttgaggtcgtaccggcttcagtatctcggcgggccgagtgagaagcggagcgccgtcgaatggcaggtcatcatggactctgctgacggcgggggagccgaagtcgatggtcggctctagggcctcggtaggagtccttggcaggagaccgtcctctcgaaactcaccggcactgtcggagcccgccgcaccgcccacggtcctgccatcgtcggggacccaaggccgggctactctggcgcttctcttcttgtcccgcctccttacctcctacttttccccacgtcccagtccgcttgcccacgctcgtcgttcgtcctctacgtctcacccatctctccgccatgcgactcattgcttctatttcaatgcactgtgtaccctcaatccacctgcctccggtgcgactgcaacagacctgccttcagagcgcaaggcgtagcgtagccgacgatctcagccttcgttcgccgaccactcgcccgttgcgcttgcgaaagcaaggcctggcaccggttagccctcacacttctgcgtcgaaaatgagagcaggaactgagagtttgaaagcaagggcgactggtggtggtgcgttcaaggcgggtgacagggtgacagagtgagagggtcgatgctctgacggcagggcaaggcggggaacgagggacgagcgatggttgaggtcgaaggagtcagaccgacgtcttcgcttctcggccctcggaggagcaagcaacaagtcctcctctagggttgatctccgtcctccctccctcctgcgaagcgacgagtgcgttctcaacacccgcacgacgcttgcgtcgctggaccgtccttctcccagccctccagagccaacaagaaaggcggcaaatctcttaagcccgccgccgaggaccggcaccgatcgaaagccgcccggatccggctttggactctcatcgcgagcgccgtctggcgcgcttgcacgaacttggcaaagggatccggaaaggaagccgggcggaccacgagtcaatggtggatgatgacgggcgcattagagcggaagggctcgggctactgaacgctcgacagtcaggcgtctgatccctctctcctgcatcccggcccgtttgacctgcttgcggacgactgatcaggatgctgggccaagatggacgtccgcaagcgcgtcaacgagggcagcgggcgggcaggactgacttcggtctgagcaaaacttggctgcgatgagtcgactttgttcggacaaaagtaagcgcgccaggaggttattcaaccgggccagatcagttggggcagaaaaaagggtcgagtcagtggctgtcgtgctggcgtgtgtgctgggcggcggcggcgcgcgagtcagcgggccagagtcagggggcggagcagaagtgcatctgcgagtctcaggcgtctggcccgcgtggccgtcgtctctctccctcgcccctcctcctgccttgccttccgaccaggacccgacgaagcgaccctttccagcagcccagtcgtccccaatccaaacccgtcctctcttcaacaaagaggagaaaaccgctctcacctctctcgacacaacgagaagccagccaggtcacacgctcgctcgcgcggcagcctcagcccacccacaccccacccttgctcgtctcgcccgtctcgccaccatggtccacgccgccgtcaacacctactcgatcatccgcgccgtcgcccggtcctaaacacaccagagccacatccagcaacgaccgacaacgactcaaaagacccgaacaaaagaaacccaccttgcgccgctatctctagcagccaatctcgccacacacccacaacacaccctacacacccgacccggaggaccgcttgaaaccgtctcttcctcgtcaccctctcaacccgacccgacccgccataatatcaccctgcgcccgttgctaagttgattgccctctacaagcatccgcctctcccctggtgagtcgcctcgagcgagcgaggaagggcgggcgggcgctttcacgaagaccgccacctgacttgactttgccacccttccctcttcagaaccgtgccttctacctagggcctagctccccctttctctcctctctcccctctccgctcgccaaagaagaaggccactttcaaaaaaaacctctcacttcccccgtctcgccaccctccgtaaaccctctcctccccctcctctctcgcagctatgcccgcccctacatccaagacgaacggcgtctcggccggctcggcggcagcgccgaagaagccctcgcgcaaccagctcaagcgcgacaagaagaaggcgcgcaagcacgccgcgcccgagtcgtcgacaaccgatggcggcggcggcgagtcgacgaccgacgccgagagcagcgtcggcgggaccgacactgagagcgagatggattttgaactcgaggtgagcaatggactgctgccgacggaggtctctcgagctggccacctcgcgttacgcatggtggacggccgaaccgagggtcgatggcgggcagctgcggccctcaacctggacctcggagcgaccgggctgacccgccttgccctcgctggccccctacccagacgccatcaagctcaacgctagacctcgccggcctcgacccgagcgatcccaactatgcggcctttgcctcgatcttctcgcacttccagcccgaggccgaggaggacggcgcggtaggtccccaacccctcctgcctgcccgcagccccatctaagccatgcgttcgccgagctgatcagactcgagtttgcaggatggtgttgcaggcgatggcgagcccaagaagggcgaggtcatctactcggacgaggagggcgaggaggaggacgaggacggccagccagtcgtctcgaagaagaagcagaagaagcttgccgtacgtcgctgtcgccccttcccccgcctgcttagccttcccccgtctgatcgctggcgctgatatcacgcgcaccacgctgcatatagaggctgagcgtcgccgagctcaaaacgctcgtcgcccacccagaggtgatcgagtggactgatccgtcggcgcgggacccgcggctactcgtcgagctcaagtcgtaccgcaagtgcgtcgacggccaagtgctgctctcgagtcgacgcttgcgggctttgctgaccgctctatactgacctgcagcacggtccccgttccgagccattggaacgccaagcgcgactaccttcaaggcaagcggggcatggagcgcccccagttccagctgccgagtccgtccaacttctctttctcgtgtagtcacaaccgatgctgacctgtcgtccctcttgcagcctatattgctgacacgggtatcgccactcagcgggatgcgatcaaagagaaggaggagacgcagacgctcaagcagaagtcgcgcgagcgcgtccagccaaagatgggaaagattgacatcgactatcagaagctgcacgacgccttctttcggttccagacaaagccaaagctgacgtcgtttggcgaggtgtgagtctcggcctgcgcataaaggcggcgaaggcatgcgtcgtcggctgaccccttgccctcctccgcagctactacgagggcaaggagctcgaggccgacgtgaaagagaagcggcccggcgagctctcgctcgagctccaggaggccctctcgatcccgcccctcgcgcccccgccctggctcatcaaccagcagcgtttcggcccgccgccgtcctacacgtcgctccggatccctgggcttaacgcgcccatcccggccggcgcccagtggggattccatccgggcggctggggcaagccgccggtcgatgagttcaaccggccgatctacggagacgtctttggcgtcgcagtcgaggaggcaaacgcttactctgcgccggtcaaccgcgagctgttcggcgagctcgagccggaagacgaggatgaggaggagtcagaggaggaggaggaggaagacgacgaggacgacgaggggggagctgctgccgaccggccgccgcatgacgggctcgagacgccctcgggcacccagtcgatcgtctcgactgtccccggcgggctcgagacgcccgagttcctcgacatccgcaaggcccgcgaagactcgttttcgcgcgcggggacagagtcggtcgacccttcgcgcggcggagagaggcagctgtatcaggtcatcgaggaacggcagacgaacgtccgaggcttcatgggctcggcgcacggttacgacctgggcggcgtcgggggcgcggccgtccctgtcctcggccaggaggagcggggcgtcaaggtgcgttttgtctctgcctctttcgattttatccctccttcaacgatcgctgacctcgctttcctcgcgcgcatcgccagcgtaagcaaggcgccgtcgacctctcgctcgacccctccgagctcgccaacctttcgaaggaagaactcgagcagcgctacgaggcctcatcgcgccagcaggcagcagcctccggccgaccgacgacgaccggcgaagacttctccgacctgtttgccgaggagaaccggaggaagcagagtcgggcggcgggcgcaagtggtggtgggcgcgatgggaagggcggccccaacaccctttcggctcgtgcatgtcgcttctctcactccctcccttcgcgacgctctcccctgcccggcagcgagcgctctattcggactttgccccccagcggcaaacgaacccgcccggcttcaaggccaacgtcgcctggtggagcgcgctcctcctgctcgcctccgaacgagggctcgaactcggaccagtcgacccggaggccggtctcgctggcgatggaggcggaaatgtggctggtcaggggagtgggctggtcctggacgtcggcgacgagcttgttgagcagcttcgggtgccaggaggtggtaggccgcttgccctcgggactgtcatcgtgcgtcctctggcagtccctctggacgaccagcgtttccgcgcccaaggcctgcatcgctgatgaccggctcttcctcgctccctcttacaggaggaaatggtagccaattcgtcgctcgttccaacctcgacctatctctcgccgagctccctctcaggcacctcatcgtcctccaacgcgtcgacgagctcgctcccgctccgcgtcgcctccaccctgctcgtcaccccgctcatatggtccttccgccagctcggacttgccggctcgagcgcagcggactctggagccggcgcgggcgacaaggcgctaggcaaggtgcgcgggacgtacgtcgttcggccgacgctcgaggtgctgcctgcaatgcccctttctgccgcccgggcgtctcctcccccacagagaaactgacctggccgaaccttaccggctcggtgccagaaaatcgcatcacagacgctcgcatccgcccgcgcccgctcgcactcgctcctctccgagacgctcttcagcccgccctcattccgcgccgcactctgcccgacgctctccgccttcgaggcctcggtcctgctcgccgagctcgagcggcgcaatgcgatcgtccgctcaacagacggcgagatcatcaggctcacgcttgacggtccgcccgctgttggcggtcgacgcgcggccgtaggcgaggtcgagaggggcgtgctcgagatgcggcagacgatctcgacgctcgaggcgcaggtggctgagctcgagacaaaggtcgctgagcgagctgagcaggcaaagcacgcgcttgctaagggactcaagagccaagctttgacgtacctccgctcgcggaaggatctcgaggctgtccttgggaagcgcgtcggttcgctcggcacgctccagggcgtcctgctcaagatcgactcgagtgccggagacgtcgccgtgcgctcccttacccagcctctgtcattcctccacgcgcaacgcgccctaacggttcgctccgcccccccccccccccttcccccagtcctcccaccccactgaccacctaacccaaaattccccccccccccccctttgcccagatcctcaaagcctacgagacgtcaacgacgacgctgcgctcgctcctcgccctgcccgagctccagctggcagctgtcgaagggacgctcgacggcctcgccgacgccctggccgacacgcaggagatcgaggacgcggtccggctcggcggcggagcggctgccgcggccgcgcccggcggccaagtcgaggaagacgagctcgagaaggagctcgaggcgcttgtgctgcgcgacaaggaggacggcgagaagggacgggacagccggctcctcggggagcgtgcgaaggagcgtgaacgggcgcacgacgaggctgggaagacacgggcggagcaggtggtggacgacgcccggcagccggcagaggagggcgagcgtgaacgtgagcggcggacagccgtccctgcttgattccctctcggcgtcgaggacgctattagattagattgacgaggctgtactcatgaccccccttcttcccggcccagacgaacgtcccaggttgtacggagcgtcaggacatgcacatcgttggatgccctgtaagaggagaaagactagagaggtagaataaaggctgagggagagaaggctggcagggcctggctcgagtcggtcagcatgacgcgatgcgaaagcgactaagcgtgaccagactcacgaaagtcttaatcgcagatgagctccgacaccttccagtcctcgaacgagccgtctgaccgaaaggagcacgcgatccaccctgtcagtctctgtccttgcgtgcgctctgaacgacgtggaggcccaaggggagtcggagacggacctggcaggtagcgccggatgacgagcggaatcttttttgcgcgcagctcgaggagggcaatgtcgagcgggtccgactcgccgcctgtcagcggaacgaggacgggcgcgttcatcctttgccatccaaccacacacacacacagtcagcctacgtcattgcccgccagctagccaggagggaggggagggggggcaatggggaggtcagaggggcatgacgcgcgtgaaggaggagaaccgggggggggggacggaccgacggcggtgtactttgagcggatgtgggcgatcatgatgacacacatgatgagtgcgacaatgtggacgaaacagacgcctagcacgagagcccgtccaagccaagatgtcagctccgagcagagggaagagaagcacagaggcaggagggaggcgagaacccaccgggctggaagacgagcgtcccgccgagctcgacgttgcgcgcatagcacgtcggcgcctggccgtgcggggttgtcaggagcgggcagacctggaggggcgccgtgtcacagatggactcgaaggtgccgaacttgaagcccatcgtcggcgagtcgtgtcgttgagggaggaggagggtggggttgccggggaggcagcagtggcgggcgcgtgaaggggcagggcggagaatgaaagcagacagcagcagcaagcccgaccggccatcctctcgctcggggtacgacagagaccctgagagagggcgagaagcgggagcgagagagcggtcgagcatatccttcctgtacgatcccatgccaccgtcgactcttggacttgctctcctcttgtcctttcctcttccagcccggcctgtctgctgcgggcggccttccctccggctctcctcctccaaccaccgaccaccaccgccacccaacatcatgtccagccacaggcccgcccgcccacaaggccgctacttcaaaggcaaaccgggcgctgcccaagctagcgactcggactcggatgccgccagcgaagaaggcggcgcgggcgatgagccgcgcaacaaggccgctcctcgcaggccgacgacgacgacggccggacgcgagatgggcgtcagtctgggtgcggccgttggggtcgacagtcagggccgggtcgtcggcgttaggaagcaaggtaacgtcctctcggccactttctctcttgagttccgcgaggggttcggggctggagcttgagggggaggaagcagggtcgggctggagagctctccccctccctgcttggcttcgaggggttgagaagccgccctcctcccctcgccttgtccgtctctctcgacgagcgggccagatacactcgctaaattgtctcgtccgcccgcctgccgctcgaccccgctcgcagagtcctcctcggaagaagagtcgtcatctgaagaagaggaagaagcagaacgaccgcggccgacgttccgcgcgcctgctccagcttctcgaccagctgctcctggaggaggaggaggaggaggtgcagctaccgtccgtcccttctcccttcctacctgccagaggcgaggtctttgccgtgtctgacgttcgaaacgtcctcgctcgacgcctcctcgtctctcggcttgaccaggccgaatcgagctcggagtacgagacggactctgacgatgacgaggaggaggtcaagaagccggtcctgcggccgacgttcgttccaaagtccgttccaccctctttattgcttgcttgctgctcgctgtttgctgctacacccgacctcgagctgactccggcgcatccccccccgccccccccccttgcaggcgcgcacgcgagacgatcctcacccgcgacgccgccctcgcgccgaccgcaacgggcgctgacttcgtggccgccgacgcccaagcggccaaggccgatgcggaagaggcgaagcggaagaaggacagccattggcttgcggcggagagtatcaaacgggagctggcggagagtgcgtcgtccctcttgcttcactttcactctttctctcccgcgcgactgtcgaggggttgccgcacctgctaacgtcttaactctcgtctcgcctcatcatcggcagaggaagcgcccgacctcgtcccggacgtcgacgacgccgacgacgccgacccgtcccttgccttctccctctggcggcaccgcgagctcctccgcctgacgcgcgaccgcgccctggcctctcagcacgccgatgaacgcgcggcggtcgagcgtcggcgggcgatgccggaggacgagcgcatgcgggaggatgtcgagcgggcaaagaagggccgagacgagaagatggcgagggcgggccaggtgtttggccagaagttttcgcacaagggcgctttccaccaggtgcgtgcgtgcgccatcgtcgtcttgcttttcgcgtttctctctacccgaggggcgcgctctccttctcaagccaaggaaatggggactgacgaccttgtctgtcacgaccgctcgccccttcgccccctgcccctcaggacgaccccctcctccaacagcgcgactactccggcccgaccgaatcgaccgtcgacctctcgctcctccccaaagtcatgcaaaagcggaattttggcaaaatgtcgcagacaaagtataggggggggaggatggcggggacgcaccggaaaagctcgtcagagataaggagcgtgccaaccgcgccgcgatcgacggccatcgcgacgtgatccggcccataccacgctcggagctcgtccgtcccaagcatcttgtgaaacctgccggtcgcacaacccgtcagcaccccctttcataacccgcaagcagaacccagcccgcaaaagacgcaacttgtccagcgccgacccctccttcgcatactttgtcccggacaggagcgtcgagacctctgggctgcggagcgcctcgacaagcgcatggacgtgcgagctcgtcgtgtggacgcggaggaacttgctacgggcctgcgagagcggcttgttggtcgttcgaacggcttcggcaaagatgtagtcatagacctgggggccgggaaagggaaagggagatcgccactgggcggatcaatatttggctcgtctgcgtgaggtcttgcgaagaaggcgaacgcaccgcatcacgcgtgaagccgggcgaggcgacgacgatcgccttgagtgtcgtgaatggcagatgccggaggacagcctggaaacacgcctggaagaagcggtccattgcctacgagacgaaagaagggcaaaggtcaggacactcgtccgctggcaagtgagcgttgcctgcagccgggtcggggcgcaccttctcatgcacgccgctctgacccttccgtttcctggggacaggcatgtcgatccgctgcctgacgaccatcatgtgctccgtcaacaggcacacggccgccgtgccctcgccgaggatcaaagcgccgacttcggcccctcggccttcctgcgtcgcctcgtcgatccgctcgagcgcgacggaatcccagccgtccttcttccagatgtcaaagtcgcggttcgcttgtgcgcgcagaaacccgccttccatgtcagtcagattgcacaaagggagggagagggagggggtggggggagacgtggcggccagacggaccctcgaggtcaagcgtgtgaaacgcgcccatcttgacgtgctggttctcgcgcgtcaccttgcccgagaggtggagtgtcgacgtcggctcgacctgcgtcggcgcggcagacgacgacgtagagggcgtcggggtggcgccggccagtgagggcgagtactctgtctgcagggatgtcagcgcgggcgcagcaggcttgagctaaagacgggacgggcactctcgctctcgcaccttagtgatctcgattgtcaggttggtccgaattcgatgtgagtcggtcgacccagttgaagagacggtttggacgcggctttcaagcaaaggcaggcgtgaggagggcatcaggaacggggtgaacgagcaagagcggctggccggtgacgtcgttccgcttcgctggctggccagacacttaccgaacagcctgagcgcggacctcgtcgcccttagaaaaaatcgacatcgctcgtcagctgccatctcggcggctagaagcgggggcaggtcgggggcctctcacgatctggacgaggttgtagatgtgccacatgtcctcgtcgtcctcgggccggagcttaacgtagccctgcgtatgtcggacaaaggcggaggccgaaggcggcgtcagccctcaagtgtcgcaacttcggcgggagcttgtcaagacagcaaaacgtcgacggaccgagccatccttggcgatgtccttcttgagcagcttcatcctatgagcgagaggagagggcggccatcgagccattcagccagtcgactcgcgcgcatgtcgacgacaagacttagacggtcgtagatgaatttcttgacccacgaccgcgcaccgactcgcctcagccaacctcgcccgacggccgctcgctccgactacactcgcctcatccccgtccagctcgtcacaccatgcccgccggatttaagcccaacaagttctttgccaagcactggtccgtcctcttctgcttgcgagagggagctgttgttttcggcccacctcctgtcgctcggcctgagccgcaatcagccgacctctgttccttcgacgccgctaacacgacccctgcctctacccttgttcgcaggttcgccgtcgaggtcatcccgtacgttcccgctctgataggacgagcttgacgtttccggtcgacagactcagccgcgcttctcctcgtccttcggagccgctcgagcgcagaacaggcacgctgacgacaacgtcgcttgccccaccgtcaccgttcgcccccctccgaaccgctctttgcgtcgtcttctgcttcgcgttctctgctcgtttctctccctctttaggatctacgtcaccggtacgtctatcctcttactcggcgcggcgctcgctgctgctgtaagccagctcctcgccgcacgcagccgacctcacaccccttcccccctaagagagaggggagaggaggggaaggacgaacgccatcggctgtctggttcaagggaatggaagccatcttgcgcgagcgggcagcagcgagcgggtaggaggagaagggagaagggaggatggtagtggtcgagaagggaagaagaagggaagcacgccgctttagggggggtgcgggtgcgggccgataaggcctgactccctaatctcttggaagcgggggggcgaaggggcaaaactctccgagccaagccaggaggggccatctcaccgttgctgctgctgctgctgttagtgcttgattctcgaacctaggcgtgttagcgctgctcttgaggaggggcagcagctcgtccgcctcacctctattctcccaaagacggttttcgctctgtcctcggccgcttgcctgcctgcaggcaggaccctccggcaagaggcgtcgcacaatcttcccttccgacccctggtccggcttatcgccctccttcgcccgacatctcctctgtcaaatccaaagtttcgcctcgctcctcgatccgacccgctccgctggctcaacccggctcggcccaagcgacgacggggataggggcgcccctcgtcgtcgtcgtcgtcgtcgtcgtcgtcgtcgtcgtcattgtcgacgtcttgatcgctccggccgtcactcttcgccatcgtctcctggcggagagcgtgagggtctggcgagcatcctgagcgatgcgatggtcatggcgaaggctgagccacgcatagaagcacatgtccatcagggaaggaagccgggcggccagcagaagcaggagtgcgtgcgagcgagcgagcgagcgcccagcgcccagcgcaaggttaggaagggccggtgccgctgcttgctgcacgaaggccaagccaagggcgtctccggccgggcgataaggtcggtcagagcatgacgccgtcgagtcgattggtcgagtgagtctcgctcctgccttccctccgaccatcaccctccctcccatctcaacacccacctcaccacagccttcaaagcaaaggatggacaggacgacagctcgctcgacatcgcgcggcagagagcccatgatgagcactggaaggggcggcgccggtaacatccgggcgacaagccagagtagaccggtcagtcctttccttcctccttagtctcggcttatcgcgcgcgcacgcgcgcgtgaggagggaggcgaagccagggagggagggaaggcgttagtcggtcgtctcggctggtgtcgctcctgctggagggacagctaccgagcgagcgtatgctgagctgtcccgggcgtccttgctgtcttgagggacgtagcgagggcaggagtggtcgagagagccagccgcgccaagcccgtctgcccgcccgtcgctccctcgcctcgcctcaccgcccctcgctcttgatcgatccacgccagtcgctgacgtcctcctttactcctcttcatcttcggcttcctggatgggaacgctcaccccagcggacgctcgacgacgaccttgcggcttctgagcgcggaaggtcggccaacgccctgccggagcgcgtgacggtgcgcccccccccctccctctcactcgctcgcgagctctcatcggtccagcatctcgagcgagcaggagtgaaacgacgaccgacgacgactgaccgttttgacactctcttcccacgcccactttgctcgccgacctcgaatctctgcgcgctcctctccactcgctatgctcgctcgcagcactccggccgcggcggcgccggtaacgtccgttcgccctcacgtgacccgcagcaggcgcgcgagcaagctgcaaaggaggacgcgtacgaggaagaggtcctccgccaacggcgcgaggccgaggctggcaagcctagagtctcgggaaggggtacgtcgagtcgtcgtcgtctcttgctttctgtcgtttcgcgctgcctgcctcttcttgcccccccttggcttgcgacgactgaggtcatggggcgaagtgggccggcggttgagtttcctctaagctgaccccctttctcgtgcccgcacgtcaggcggcgcaggcaacatctcaaacagccgctcgcgctcgcgctcgcgcgggccggccgggaccgccaactcgggcgcgaccgagcgcgagtcctcaatgactcggtcgggcgggatcctggccggcaggggcgggttcgggtacgttcttcctggcgttcggcccccatcgcctttcgttttttcctacttcttcatctccttggactggcctcctcctgcgcttcacctccccttctccttcccccagctcctcatcctcctcttcctccctcgagtctcggacgacctccttacctcccagttttgttcaatttcaaaacgctgacccctcctctccgccctctcggctccgtccccggccgctgatcccctacttcaccccgaacccaccaggatcagtccggtcaacaaaaacatcgacgactttaccaagtatggtttcgcttaccacggttcggccttccgtctttctctccttaactcgcgcgcttgggcctgaccccgtcctccgtcccggcaggctactgggtctcgaacccgaccgagctcaacccgcgcttcggcacggccgacgacctgaagtacctgatcgccgaggttcacaagcggggcatgtatatcatggtcgacattggtctgtcccgcgccgccctacgtcgcttcggcttctcgcgctgaccgcctcctccctcttccctgctcccagtcatcaacaacgttccgatcaacgccgacccgcgcgagctcgtcgttaccgaggggctcctcgtctcggacggctacctctttaccaagcccgaagactaccacccgtactgcccggtcgactacacgaacgacacgtcggcggaaatctgctggctgggcgacacgtcgctcgcgctcatggacgtcaacaccgaattgcccgaggttatttcgacctacaacaactggatcaagtcgtttgtcgaggagtatggctttgacggcctgcggatcgacgccgcgaagcatgtgccagagacgttttggccagacttttgcgcggcagccggcgtctactgcatcggcgaggtctttgcccaggacatgccgttcgtccctactgctcgactgacgacgacggggctcttttgcgacgtgctgactgtctcctctccccctccgcaggacgtgcaagcgctacgccgacgtcatggacggcatcatgaactaccccgtctacttcggcatgatggacgcctttcagctcccgggcccggccaacatgtcgtcgctcgtcgatgccctgaccaaggtcaacgagacgctccctgacacgcacgcgcttggcgtctttatcgagaaccacgacttgccgcgctttgccaacacgacggtcgacccccagctgcagtttacaacgctcgccttccagtttgtcatcgatggcatcccgatcgtatattacggccaggagcagggcttccgcggcatcgccgatcctgtgcgttctcttgtctttcgccagagcgtcgtctcgcgtcgctgaccgacttgcgctcgcctcttagtcgaaccgcgagccgctctggccgtcaaactacgcaaacacgaccgactaccagcgtatcacgctcatgaacgacgttcgcaagcacatgcacgaccgcgagctcgtctggcagggcaagacgttccagaacgacacgatgtcgatcgtccaggccgacgcaaggacggtcgcgatccgcaagggcccgctgctttcggtcctgacgactgtgggtcgctcgccactcgccactctgtcgcttgttgaagacgtcttgctgatgctgacgccctctctcctcctctcagcgcggcgcaccaccgacaaacgagtcgtttggcctgatgaacgccggttgggacgaaagcacagttctcgtcgacgttttctcgtgcgagaagtttgttgtcggctccggcaactcgttcctcgttaactatggcgtccgtggcggccgaccagtcgtcacgcttccgctcaactacctcaacggctccgacatctgtctcgacctccagagggcaaacaggaagacggccatcgtcggcgcgccgaggccaactggcggcgcgctcggctcgctgagcagtttgccgtcagtcgccgccctcgccgtcgtcctcgggtcgatggtcggccttgcgcttttctgatacagcccccccactctctcactcccttcgtttttgacacccacactcatttcattgctcacactcgctattgcccccttgcccattgatgtaacacttatatactcatcgctgtggacccgaacgagcgggaaggcggcggattcaagctcagcgatggaggaggaagcctgcgtgcgcagctgggtggcgtctggaccggcgtcgctgctgggacggcaagtagcagcggcgatgtaaccgatcgtggcccgtcgcgcgaggcgcggcagtctgggctcttataggaccggtcggactatccaggtaaagaggtcgcagttgggggtttccaaagtgtgagcgagatcttgtcggatcgagctcaagccttgcccactggaagcagacgattgcattcgtttgtgaacctgccgcctaaacgggcggtcaattgggcggttcgggtggaagcgaccggggaagggtgggtgaggcctgcgggggcgggatgagcaagaagtcgtccgacaacagcgagaccggtacggcttaatagctcccgacgatgcgaccccagatcaagaaaattggcggtcatccgatccccctcctccccccgtccgccccaaaagaacgtcagacgctgacaagaattgctttgctttcagtgccaacgtcgactacgaagagccgtcgattcagaacccgctgccgcacctgcggctgatcgaccccaaggaccctcggacgggtgcgtcttgctgcgtccgaccaactccacgcagagcacggctgaaaattaccgtcaccacctgcagcgtccgaccctacgtcgagcgtcaactctgacctcctgcgcgaggacctggcctcgatcgactgggccgtccggtatcttgacgcctgccagccgctcgtctctgtcctcaagacggcgtccaacctcgccaagagtgagcgcgcgggccgtgaatcgtccgctctcgaagactggcgcaagcgtcgccccggatggctgacctcccgccccgctttcgcagagttcgagtttgaagatgtctctgaggatgagacgcctttgcatcttgcggtcggcctgacatcaatcggacggatagcaacataatttcatccggaagggcgcactgccgagacgtctaggagaaccggggcgagcgcggaggaaagacagggccccgcccgacgctcagagcttctcccacctgttgacgagcattcccatgccgccgttccaatcctgaacgcggcgcagagtgaggatgctcatcgtgctctcgccggtccctgcggtgtcggtcaaaagggcgtcagtcgaagacaagacggcgcgagtcgaagccgacggcaggccgggcagtagtcaccaacaaacaacttgccgagcgagaggatggcgacgtccaacagcgtcggtccccagtcaccactcgctccttggtcttcatcgcggcatggtcgacgagacgccagccctgggcctcgagctgaagcaggtacctgcgccgggtcgagcggcgagggaagggcggcatgtgggtcagtccctcgactgtgcacgtcattcccgcagtgtgccaactcacgcactgtccatctcgtccgtcgtgatgatgacgggccagtcctgtgcgccgctcgacccaaccgacgcgagtcgctcccggaaggcggcgaggtgccttgcatagacgccaacggcgccactgacatggagacagacggacgtcatcgacgacactgaccggcctactctcgcgcgacttgccaggcgtcatcgctcttgcagctgctgatgaagtcggctcggcgagtgtgatcgtggccacaggggacggaaaggggcggccgtcctcactccaagggtgagacggagcgttgcttcggcctcggcaagcagaccactgtgccagcgcaggtgccggccaatggtcgaccaggtgccgaagggggcggccgtgaaggtcggctggccgaatctcgcggacctcctgtcctcgctcgctagaatgatacgggccgtcggtatagctaggcgagcgttccgtacaagccgacatcgggtgctcgccagccggcgacgcgattgccccgaaccgaccaccagtcagcgtcgcccacgccccagcgactcatcaggagggcaccttcccgtaactgaccgctcagaaagtccaggcgagccttgttgtcggctgggctcagcaggccagcgaccaagcgcgacgcgccgaagctctgctcccgcagtgagtcaacaccctcccgcacgctgcctcgcatggcaacgcctgcctgctgtgaaaatcacttgcttttgaccggcagtagaccggagcggaatgtgcataaggaatcagaaaccgcctgctacatagccctgtctttaataaacgaaggaggggaatgagttcggagggaggacttcattagagacaaaagagggagtcgagaaggaggcaggagacgaccgagacgaggggagaagggttcggatacaaggagtgcccggcagcagacaggacgaggtaggaattaggtaacgcggaaggagccgagaagaagctgcgcacgaaaggcgcgtgggcgcttgtatgtcttccttcccctctcaaccacgtcttaccaacgtcacctgctctgcagctcgccgtaacgctcaaaggcccacaaatggcctgaaccgcttcttctcagctcggattgcgcacaacgccatcgtagggtccagacgggctccatcgctggcggctgctgactgagcttcacttgatctggccgagcccgaacggtcggagcccccagcgcggcggcggcttgcgacgactcggtcaggctgaacggttgctcagccgcaggcgagccgactttgctgaccatgcacgcatcgctgaggagctcggctgatgccttcataaggcggcgggcatataccgtttgaacctcactctcatcatctcattcactcgctcccctcccagacctcgtcccacctcgcccccctccccttttccatccccctcgcaaaaccgcttcgcctcccttaacacatgtagctcgaccctgctttcgccgccctccttcgtgaacgaatgaacgtccccagaccgtcgtcttcctgccctaaagaaagaaggggcattctgtcgaggcgccggccgtcgctgcagttgaattcagccctgcccccggtcgacgacgcgcagccttgttctctcgtccttccgccgccaaccactgccctcgttttatgctctctggctcgttcctccggcccttcctcgctcgttcatcctgtcccgctctcttccgaccgtcaacgagaaccatgtcgaccgctcctcctgccgagaagaaggctcgcgttactgaggtccgtcgaaccaaacgcccagcccagctcgttcgccggcgctgccccttgggcctctgctgctgtcggacctgcctgtcgcagaaggagctaacgcaactcgtctctcttgccaatgacctaacctgctatccttcagctcatcggcacgcacagtggcaccttccactgtgacgaggctctcgcggttcgtccctctggctcgagctcgtcgggctggccttcgtcctgacgctcccttcgaccctgcctccgtgccatgctctgcccgacaggtcttcatgctcaaggtcctgccgcagtacaaggctgccggtgcgtgcaagctcggcttctgtgccttaggctcactgcgctggcagtgggagctcgtttcttagcgtcccgctgacctcaaagcggcctcactgacatcctcgaccgtcgactccttcagacgtcgtccgcagccgcgaccctgcagtccgtgcgtagattgcccttctgctctcgccgctgccatcgcagagctcgactccttgtctagctggccccggtcctgacctcgtcggtctcatcccggccttccagtcgacacctgctcgatcgtcgtcgacgtcggcggtgtctacgagcccgcccgtcaccggtacgaccaccaccagcggggctttgccgaggtcttcggccacggcttctgcaccaagctctcgtcggccggcctcgtctacaagcactttggccgctcgatcctcgcaacccacctcggcctgcccgaggacgacgagacggtcgccaagctttacctcaagctctacgaggactttgtcgaggccatcgacggcatcgacaacggcgtcacccagtttgtctcgtccgagcccgcccgctacaagtcgcggaccgatctctcggctcgcgtcggcgcgctcaacccccgctggaacgagccctcggacgacgctggccttgacgtgcgtcagcactgccgcttgtcgcagctcttatcctgacgaccctttcttctgctttctgacaggcgcgcttccagcgcgcctctgcgctgaccggctccgagtttatcggccggctcgactacctctcgcaggcctggctgcccgctcgccagatcatcgtcgacgcctttgccgcccgccacgccgccgacccgtccggccgcgtgctcgtctttgacagctttgctccctggaaggaacacctctttgaggtcgaggccgacgctggccttgccgcggacgagaagccggtgtgtctggtcgtggtgccttcgagctgggcgcccgtccttcgccaattgaacgccgggcatgcactgacttccttccacctgtcctcctacagctctacgttctctacccggaggagtcgggccgggcctggcgtatccaggccgtccccgagtcggccgagagcttcatgagccgtaaggcgatgcccgagccgtgcgtcttccgtctctgtcattcccagtgctgtcatagttcccgctgacctcttatctttacgacctctagctggcgcggagttcgcgacgcagacctctcgggcgtcaccggcatccccggctgtgtcttctgccatgccgccggcttcatcggcgtgcgtccttcctttccttaaaaacccctcgcacacgcatcgctgaccacctggcgcgcacgtctcgcagggaaatgctacgaaggagggcgcgctcgagatggcaaagaaggcgctagcatgggcatgaatgaacgctgaacgccagtagacgcgatgactcgaaatgctgtgcacgggctacttcgccgacagatggctccaaaatcacgggtcctggcagatggatagccgtcgggcaggctcaggcgtctgcgtcggttgctcgagggaggacggagccgcttccatagccagctgctcgcgagcgaggagtgcgttgatggcctgtctgacagccgaacgatccgatggctgacagagaccgacgcgggcgacagctgagcgatggacagctgacatccgagctgttcgatgccccactctctcctgctcgtgagagcaggggccttcttgtagcccagtgaattaagactaaccatgcaaagcatctcgcctccttgtacgtctgatctggcattcttaccacggcccgtggccttgccgtgctctgctaaccatgttcaggctgtagcctgagcggctggcctgctgagaggccatagctagtctgcccgtcgaatactcctagctcgttgcgtgaggagatgagcggcacgtcgaccggcggtgacagggtgaaaacaaggctcggcgcaggagcggccgacaggttgctcggcttcggcctcagtgagtgctcgggggacctgctttgactaacgatgggccgtaataaggtcggaagtcaggtgtgagagggcagtgtaagccgaggcacagtcttctttgaaagcgctgggcgagggtcagcccggacacggggcgtttcgcccgcgacccttgctctagaggtcggtcccggatcctgcctctcgaaggatcgcatacgatcctctccatcgccctacggctcccttccgccaccgcccgtgagcttcctgccgagctcgcccgcgaggccgacgatcgactggacgccctcgaccgcctcgctcggcagccgcgtccactcgaccgccctgacggcgccgaccgcgccctcgacctcggcgttccaccgcgcctggatctcggacgagagcgaccgcgtcggcggcgtccgctgccgggccgatatgactgcctgaaaaggcgatggctcgagcagcgatgggtccaataggtgcagcgacgtcgtcgccagcctgcgagcgggcgaaaaggcgggcggcagagggtcagcctcagtggcgcggaccttcgcctcgatggcagctcgaccagagaacaacgcacgacgaggcgagctggctagtccgggcgcgcatgtcgcctggtggtcggggagcgagcaagggagcgagcgcagcaggctgtcagcggagctggcgacaggtgcctcgtcctcaccctgcccacaggaagctcagcaagacgcactggccatcacgacgtaggccatcccacactgcaatcagccgagcgaggggacgagcgagcggaggaggccggtcagcgacagctcgccgacgcctgcgcgcccgcactcgaggcgagctcggtctgacgaaccggcaggcaggacgcaccagggccgcgccggccgtcatgggcagaagctgggaggccatcctacaaggcagtagggagcgactggagctgctcgagcttggctggacagaagcagaacaaggcaaagggctgagggctgaaagcaagatgggcgtcgaggtcgagggcaagccgcagcgcgtcgacctaaactcgcgccctccgacggcccgacgagaacgactggcgagaagctacttatgctctatctggactcgcgagcggcacgggaggcgagagcggcacgggaggacggcagctgactctgctctgcctttcaacccccagaagacactcgcaaaggacaggtttctcggaagaccatgggatcaaccgtcatggaggggtgctcggattcgtcaaaacagggcgactcgctctcgtcaatgggatcccatgagggactccgtcaacgtctgggaaaggcagggaaggcatgaaagggagttcagctcgagtgtgcaggccgaccgaaaatgacaggtcgacgacaggacgtaccggcaggccgtagagtggggcgaatgaactatttcgagcgcgctctcatctttctgcgcttcttcctgagactgtagagggtggagatgggggagagggagttagcagggaggcttgaagggagaagggagggcgagggcggggcaggcaacggaggatcccctggtgacgctgccgcgagctgaggatctcccgccggtttgcagcaggccagcgtcgcctgggagcgaccactctggtaggctgcagagcgaccgtcgagcagctgggagaggaggtggccgtcgctgctgctcgtcggttgctcccgcccggccacctcgccctcgcccacagaccgccttcaactcgttcgaaagcgagagagcagggcaggatacgaaccgtctcatccttttcttgcgccatttatcccctgtggtagcgtagaagtaggagtcagtttgagggcgaacaggaggtgaggtcgggcgagccggctgggggacggggatggggtaaaggagaccgtcatgtgaccgcgcagtctgccgacggcccccgtccaaaccggcacgacctcaatggtgagactcgacaggaggagactgagggtgtacttacgcatggttgatgatggatgatgggtggtggacaggaaggaggggaggccaggccaggccagacgaccaagttccattggccgccggcaagcttgcacatgctaaccctctgcttgccgccgtcatcctgtgcagccaagcagacttgagagctccgcaggcaaccgatgccgtcgtagacagctctttatcgttcggcagtcagtgacacgaccttcctcccaagcgacgggcggcgggttgcggcgaaaatcgcgaacatggccgggtgccatcttctggccagacgtccttgcttcgctcctgactgtcatcatcgcgaccgacgcccaggccgagcagcaatgggccgccgtccggaaaacttctgtcgaatggtagctcaaggatgaccaatcacctttgccccaatctgcagcggcgactttgccgatcgcatcattgatgccccttgtgccccacttttttcaaagcacactgctggccgaaggcctccatgagtcagtagctgagctgcctggttgccaacccgagctcagctgacgttctcgaagttagagtcgaagccttacgggcttacgacttcgcgcgacgtgtgcgacagagtactgactttgaaagacagcactactcgactggaacgtcacgcttcggaagatgatcgccgggcgaactgttgaggttgattctgcttcacctgagtgcgcaacgatgttgggaggataatggcgaccacgttgggaagttcaactggcgtgcgaaagccgactcgtcaacaaaaaatcagacgcgtcagcataggtctcacccgatgagaaagggctcaacagtcggctctaacaactttgaagcgggcctgcgggcgagccgaaggatattgccgagggcctgccgttgtcattcatctcctggtcaaatgttgcctcgaagcaatttctggatggtcgcgatgatctcgtgtttggggagggacggggcagcgtgcgacggaagccgaaaagtcccacgaccgagtaggctcagcgcgtacgacaccctcgaggtccgatgatgtacgacccgtgcgacgtgcacaggccctgcttcggccgtctctcggcgcgaaggatgagaagatggagtgagcgagttcatcgcgagactcactacagtcgccggcctcataccggactactcggtgtgcaagtcggcgcatgggtgttccatcacttgtaagacggctgacacggcttgttccagtgtacttgcatgaacttccgacgagcaagtaactcgtcggtgattacgacacggggattatgatacgaaacatgatgggtagatgagagaacgtattttcagagcctgaatgaattttgggattagattcttgaccataatcatagcattaaggaaggccgattggcctagtggtatggcgtaagcttccgattcactttgatcgcttgagatcaccggttcgaccccggtatcggtctaacgttttgccgcggacgacatcttttgatcatcaatagcaaagacgtcgatggggaagccttcccgcaatgccggctcgcacttcttccatgcgatgaactcggtcatgcgcatgctcacccccttgaaagtggctgatgagccagatgggctggcctcggctcccttcgttcagcactcgccctagctcatcaggtgtgagctctaagctcccattccactgataggaaggtcgtgcacgagagtcagccctgtatcactggtcatcaccgcagctacggttgtctactgttcggtacccattgccactaaaccggagaaccaccctgcgactttagccactgagcaaaaaaaaagactgaggaaagcgcagccgtctggcatagtggtcgactacgattaggatatacctcatgccgttgtgcgaggcgagagtggtccttagacgtccgcgtggacgagctcgagaggacgagtgggccggcgaccagaggtgtcgaagggtgctttgtgaagtagttaaaggcgtacgacaggcttcggtaaagccgccagacctccccactcgccagtgaatactaccgcatcccccatgaccattattgtggacaacgacgaggtgagatattagggtgttggactaaaacgacccctgaatcacaaccatgtcattctttaagcaggcccactcgttcgttggtccttccagatcttgacgcctgattcggagcatccggcagtgcgagagatgcttccgtcgcgagcgtcataccgtccgagatcagccgcgccggcgtcgcggtatctgactcgccgacatcgaatcgtaaaacagctcagcagagcagtggcagtggtggcggcagcgtagggccgtaggtcggctggaagggtgactcgtgcgcggccctgaggatttgtgcagcaggcggcatgtacgcgtacgccatccccatcggaggcgcagggggggggggggggcctggcacccgcccgggccgccggcagcttcaccttcgtcatcaaggagtttgagctcgtcaagaccgtcatcgacgtcaagaaggtcggcgactacggctaccactacgacgacaagaaggacgtcgacgcgtgcgtcccttcgtcgtccttgcccttgctctctgctcggctctctcgctgacccgtctgctccttcgtcctcgccctcccgcctgcagcaagatcttcgcctttgtcctgctcgacgacaagaaggacgacaagaagtgggtccctcctctctcgcgctctctctgctcgttcgctgactcggtcctctttcctcgccgaccagggactacggctacgactacgactacaagaaggacgacgacaagaaggaggacgacaagaaggaggacgacaagaaggaggacgacaagaagtgcgcctctcgttgtttctctcccattggtatatgctggctgaccctctcccctcgctcgcccgcccgctcgcagggacgacaagaaggacgagaagcagtgcgctctctgtccagttcctcgtccttccctgccgctgaccctcttccctcccttttctctcctctcagctaccgcttctaagcctctcgcgccgaccgtgcgccccgtcctctctcggcctcctcatccgcagcgagaggtgtccctcccctctcgtcttctcgctcggcggcctgccaacccccgactgcacttgtagatacgatgccccttcctccccccttctcgcctgcctgtgaaagaaagcgcacggtgctctctgctgctgctgacgcccgcttctcctgctaaccctcggctcggctgtcgccttctgagaagcaagggcatgcgacaggccagctggaacaggggacacactcgcccgctgtagatggtattcgatcaagcgcagcgcatcgtgcattgtcggtcgaccgctcgagccgagcgaggtcgagctcgatcaactgtgcgtaggagcgctcttgagagctgcaagcgagggaggtcggccaggagtcagcgcgagacggccgtttgcaggagtagacaggcaggcaggagtagacaggcaggtagaagggacgcacgactcgacgccggtcaggtcgaaccttcgcccaacccctggccgccttgcttgctcttgctgaaccctttctccgactactttcctgcgtctgtccgtgccctgcaagcttatccctccgagtgccctcagtctgccctcttgctgccgtcgctcgccgtcgcttcgtcttgatgttgctgctgcgcggtcgatgcctgctggtccgccctcgctcagccctcgctctccctccgactacattcgccagctgaccctcgcgccttctactgcacgaccgactcgtaaatcgacgagcagatcagctggtgcttcagctcgaccagagctatctccagtccgcctcccgtcttctcgcccgccctcgtccatcgccgcctgctggccccttgcgatggtctggctgactgacgtccagaaagtctgcctgtccggtcctgcccttctctcattcgtccacctcttgacgccgcctctcctcctcctcacccgtgtcagattggcgtcggctgcaccgtctttggcggcctcttccaggtgcaacccggaccgagctcgacctcgtcctgctcgctgacgggcgagacaaggtggctgacccgttgtgactccatcctcttccttcgaatagtttctcggcgtcgtcatgctgtttgacggcgcgttgctcgctcttggaaacgtccgttcctatcgctccctctcccgtcgaggcaaaacgagccaggctgaccttagccctcacatgctgcgctccctccggtcaacccgcctctagatcctcttcctcgccggcatcaccgccctcatcgggccgcgcaagacgctcctcttctttgcccgcaaggacaagctccgggggacggccgccttctttctcggcatcttgctcgtcttcttctacaaggtgcggcgtgaaagaaggcaggacagggcagaccgaaggccgaccgtgctgatgctctctgccttctgttgcatccccccccgcctccccgcagtggccgttcgttggcgtcctcatcgaggccttcggcttcatcaatctgtttgggtgcgttctgccctgccctgccctgctgtgcggtcggtcgacgccatgcgcttatcgacgcaactcgctgtctgtctccttctgccccgccgcccgtcgccgcccgtcgcagcgacttcttcccgaccgtcctgtcgttcctccgccagctgcctatcatcggcaccctgctctcgctgccctacatccgcggcgtgcgtcctctgcgcccgctctcgggcttcgagggggggacgagcgacgacgacggtgaacggacctctcaatctggaagatcgtatcgactttgctgccgagcttcttggtctcctgaaggggtcgagaaaggtggtcagaggttggctttcacacaggtttcgagccacccggagctacgcaccaggtcctgcgcgttgtaggcggcaatgatccgtgccgccccgagtttctcctcggcaacctttgtcatctcgccaatcgcatcttggctgagcctgccaagctgcttctggtactcgccatacttcttggtcaggatgaacgtcacgggcgtcgcggcggcggcgacgagcgtgaccgggacggagatgtagagcatgacgccgaggccgatcgagcccatcaggatcgactggatgccttgtgagaggttgttggagagcgactcgccgaggatgtcggcgtcgttcctgcggaaggggggaaggggggagggagggggtcaggcagagcttagtcgtcaggttcgatgcaaggccgcaaacgagacgccgaagatgggacgcacgacaggcgcgagacaatgttgccggcctttgtgtcggtgaactggatctcctggtgcatgaccgagccgtaagcctgcttgcggagccgggcaatgatgcgctcgccgctcatgcccatcagtgtcgaccggccgagggcggcgagcgcgccgacgacgatgacggccccgagcgttaggcatgtgttgagaagcgagaggcccatgaaggtcgtctgcgaggggagggcccgttcgggtcagcctttacggcagacggcagagaagcaacaggactagaggataggacgaacctctgaaggtgtcgcttcggcaaagtagttcatgagctcgccgatgcagtacggcaggacgttgccggcgatgctcgcaatgacgaggcactgtagcgcaaggcgaacccgatagacgtgatcagcgcgaggaggtcgcgaggaggttgaggacgcgctgtcttccaatctggggacgtacaatgagtccgaggccgatcgtcgtctgccagagcgacgaaatgaggtgcgatatggtcagtgggccgtacgtatcgagcggcaacctgcccgatgcctccgggcaaagcgagcccggaagcaagcctcaaagtggagagtgagagcgagagcgcgaacgcaccttctccgtcagcgccagctcatacagccgcctatacgaaatcttgggctcgttctcaaccgtcgtcgcctcggacgtcttgccgagcggagcgtcaaactgcttcagggcgaagaaggcccgcacgcgttgaacggttgactgcggctggccgccggcggcggcggtcggcgggagggcgctgcttagagtcggggtcgagacggccgcggcgtcggaggacgagggagggctctgcgagatggctcgactcgacgtcgtcgagggcttcgccggcgctggatgagagggacggcctgaaggcgtcgtcgtcaggcccgccgtcgagcttccgccgccggccgtcggcgacgaagtcactcgaggccgccgcgcaggagcgtcctccgacgcatagaagcgcctcgcacccagcccgacacagagcgagactgtcgagcgctgcttcggggttgctgctgctgatgctgcccagcgagcgctgcttgctgagtaggcgctgtggacgagtggcctctggccgagggcggcgccgacgctggtgtgcgcaggagggatcgaaagtccgctgccgaggcgagcgagcagccgccggccgaccaacgacggagggagggccattcagaggcgggcgagtgccgaagttggacgggacgagcgtctgggtcgagtgagagacgtcgtgggagagagtcggcaaggtggcggggttgctagctggtcgacgtccaggggaagaaagcggacgaggtcgaagcacgaggccgacggggccgacgacgaacccccacgacgaccatctcgacttgccgcccctcgccatgtcgtccatgcaagagtacctcgcagcaaagtaagcatccagaccatctccgctttccttctgcccggcgctgcccggcgcggaagagctgaccgcccgcctactccctctttccccccccctctcccccctccaaacgaacgcaacgcgtaaaggtacatgtccggcgcgaaggctgatgcgatcctcgctcgggccgagagcaacggcaccaacggcgacaggacgaagcgcaagaagcggaagaaggtcgatcggtacgacggcggtgccgggagcgggggggcgtcgggctcggccgaggcgagcgggagcggcaccagcggaggaggggggatggtgctcgtcgatgaggacggatgagggatgcatgcgtcagggcgcggcgcggggtgttggagtgcacactctgatgatggccccctttgtcctcgacctgactactgcctgctggggaccctcatcctgccagctgggagccgtcgccagcgacgtgccgtgcctggcaagcctccttctgcagacccgaaacgaagccagagctggagggcaacatggcagactgctgactctgcgccccccgaaagcgcgcgaccccttcgcgggccactcgtcctcgtcccccggatgcctccaacggccgcctaatcctgctgcgccctccggatcgcccggccttcgagcttgagcagccgcttggtcgacaggcgctcgatcgcggccgtcgcgtcgcgggcgcgcgcgagcttgagctcgggcgttagaggcgcgtatttggacacttgcatcgggaggaggttatacctgtgcgtttggggtaagcgagagacaggcgaaggaggaggaggaggaaagcaggcagagcaaagggcaacgttgcaggagggcggcgtcaggtcgagcacttggcgcgggcgcgcgcgcgtcggttcgcttcaggccgctcgccagggagtacgtaccgcttcgcgagctggttgatcgagttcttgaccgggtcctcttcgcgcaaccgcgccatctccgccttgtccttgcccgacggcgccttcggtcggtggccggcctggctcgcctcgacactcccgtcgacgagccggtcgatccgcggcgccataaagccgaagccgggcgtctttgcccaacctgagggcatccgccggccgttgggcgagaggtttggctcgagcgaggcaaccgagcgcggggaggcgagcgacggcgccgggttgaagacgaacgtcgcgccgccgtcggctgctcccgggctcgactcttcgagcggcgcctcgaaggccgctggatggagcttcgtcttgtacttgggcgggttggcaagacgtgggtggtggatgacggtccggcgcgagaggggcgcgagcgagcagcaggaggcggaggttgagctcgagctggaggacgaggcgcggagcgaggggaggaagaaggccatggctcgggaggaggaggcggtggcggcgccggcggaggcagctgagggagattggacgagaacaacgaccgagaggggcgctgagtatcaaaggtgcgtgcagctgtgccgaggcgagagaggagatcggaagagcggtcgagcggagagggcgagctgggcaaggacggacgacggagtgctcgttgggtcatagttgaattcatagttgcgtcaaggggacttagacgtgcgtcgagcggcccgaatttggctgcgcccggcgcgggcaagtcgaaggtctctcgagagcgcagaagggcgagagcagcagcagcaggcacgacaccaggcaagacctcatccctccttcaagctcgttctcaagggtacgtcctacgtgtggctctgcacacattactcgccacttgcgaacgctcgggctgaccctgctccttccctcttgttcgcctgtccgccgccgacccgcagcctctttcggatcctcctctctctctcgcagcctccgaccctctcttcggccgcaagcactcccgactcagctacccctttctctctctcacacacacactagcatgagcttccgtggacgtggtggtggaggaggcgaccggggcggccgcggcggaggcttctcgtcccgcggaggtgcgtccctctacagaccatttgctgctcgctgctcactgctgacgctcgctagcgctcggccctgtgctttgtgcgttctgcatgcaggtcgtggtggaggacggggtggcttccagcagagctacggcccgcccgacaccgtcctcggtgcgtctacgcattccaacccgccaactcgctcgcccagccggtcctgacccctgctgctaccctccccttcgttgcagaggtcggcaccttcatgcacgccgtcgagtccgagatgctctgctccaacctccttccgaccaaagtcccctacttcaacgcgcccatctacctctccaacaagacgcagattggcaaggttgacgagattctcggcccgatcaacgaggtgtttttcaccgtcaagatggacgccggcatgacggccgcgagcttcaagaaggacgacaaggtctacattggtggggacaagctgctgccgatcgagcgcttcctgccgaaacccaaggcggccgtcatgccggcgtccatcttgacggtgaaaaacacctcgttgatcgggccgagaatctcgtcaaccttgccaatctgcgtcttgttggagaggtagatggggaccgctacggtacgacgttgttgaggcagccgcctagcggttaccaagtctagcctagcttgttcctcttcagctcgagaacgaaggataagcaggtcaaacgtgtgtgaggacgccaagttctccctcaagcgctctcaaagcacgagaacggtcagtagtcctcacgacgcggcaggccagtcagctcgctcgaagatgtcagagaaggtcaactgttctcataagcgacaggtggatctgcttgctggaaggaaaagaactgacgttcctgctttttcatcagagacagggcagagaggcaaaaaagatgatcaatagcgggatcgaaccgctggccttggcgttattagcaccacgctctaaccagctgagctaatcgatcagcttgttgacaggtttcaggtcaaacagctagattcttgaatcactgcgtcctgagcgggtacaccccgatgcctagccacagagatcaaaagagcttggtcggagttggcaattcattggcacagcaaatcgacctcgaccgaaaaactcccatcacaaacggacagcttctttgtcgcacagtgccgtctaaacgcccggtagtaggaagcgccggcctcgacacccaacgttcttccaacgcctggacaaggaggaattcaccgtcgttagctggaatcttcagaccatttcgatcaagacggccaggaatagacagagctgtgtttgctcctagcctgggaacgccagaacgagtttgcgcaagtcccatccgagggtcaggcggcgcgtacgctcaatcgagatcgctagccgtcgggagcgattgtcgggtgcgtgcaaagtcaacagcccgccctttctgctgatccgacgcagtacgaagggcgcagcgagcatctgggccaaacggggtggcggctgcggtatgaaatcagccgagtcagctggaactagtcaggggctggacaaagccacatgagacgaatcaggagctgtcggccatcactcaaaactcagagcaggtggtcatttggcaatgcaactctaaaaccattcggggagcgtatgacagctggaaagtctgcgaggtttgcctcctgcaagtgcgacgctcgaagtcgaaccgtcgactgcgcggcaaaggtcgaccaaacgacaagtcgctgttcgcctctcctgtcctgcaggcgtcgacgtgcaagaagagcagatttggcattttcaaacgggccaagaacgcgtctcgaatgatcagcagcgcaggcggcaaatgcatggaaggcaggttactttcatattgtgacaaaggccgtgcttgaatgcacgcaggggtgccgttccgattggttgaggtttccggctcgcggccagatgatcaaagtaagtacggtcgacagtcgtccgactcgggcgctgatgtcaagaccttgcgaactcaagcgttttgttatcatcttctgccgttcaaggatctttcacaaagcatgcacccgcgtagtgtagccgtgcgatatgaggcctggcactgttctgtcgctgcttgattcccgccgagaaaagacatgtgacttttgagccgtgagcatggagaacgacttgctggtgtgcgccagcgcacagattttcgtcccgtcgtttccacccacctctgtccaacaccagtcctgagcagtacgaccgaccgtctgagagggcgggctccgtaattgcgcgaactaagttgcaaaaggattatcgccgcggggaatcgaaccccggcctagtgcagattgccagatggcaagcaccaatgaataccacttcaccacaacgatttggtgatgtttgctgagcactataacactataaaccactttgcaacaacgtgcttagcgggtgttcaaatggttggttgacctgccttaaatcgctgtcaattggtactgacctccggagcaaggttcaaattactctgtattttaaaggacgatatcaccggcagtgggactctgaacgagtaaatgttgtagtccggcaaacctcccactgtgtgcgtgtgactgcttatgattatgttttacctattcttacctcctcaagaggataagtaatgagtagcatgacgctccgatctagcaacgcttgatgtcatcgcattgaccgtcgactgtgcgaagctccgctcgctgtcggaaggggagcttccgcggttggtattgtagaacgagacagcggcaaaagtcgcctcgaaggccaaggcgagcgcagccgtcggccgttccgcgagaaccgaagcgacgaggagggtgagtgagatggcccagatggctcctcaggtctccgacaggacaccgagcgccttctcgagacgggtgacttgccgttgccattgcgggtgaggcgtctcggcctctcaaagcgtcagaagacctgcgccggttgatcagcttggtcggccagctcggggccctggcatctacctgcccagctcccctctcgtcccgcttcgcatatttgccaagatggagcggtcatccaaagaagtcccttacctgcctgcagtcgcccctcaagtccctcgtcggagccactcgttctcctccctgagcgccgcattctcctgccggaggtcgtcaagctctgccgagtgtcgctcatggagcgtccgcagctcgagctttgtctggcgcccactacggatgacctcgagctggacgtctcttagcgccgacagcaggagggccctgccggattctgcatgcggcggcggcgagtcaaggtcgaggtcggtcggccgactgggctgcgcatgcgaccaccggggaaacgagacgtccgagtcgaacgtcggcaatgagggagagagagacgcgcaggggaacggccggagcgagagtccgtgtcgggctctaagccttaccagctggctcggccggagcgtcagccgacggcgactcgtgcctgtgagacgagttggccatcaaggatgacggtcgctcggagcgaagcgcagcttcgacgtctgctgcaggcaagatggccgacgctcgtgacctcggccggccgtctgttcaaaaagatgcacgacgtcagccatcagcgccagacgcattccgaggaggcaaggcgcactcgacatcgaggatgatggccgacgggggtgaccttctttctcctgatggctggcagctgtcgaggtcgagggcacccgagaccgaggagccgtcgccttgacgagcaggggctgcagggcgatgagcagatgttagcgtgggcgagctatgagccggcgtgctgttgagccaaactcaccaggactcggattgcgccgaccggtccgccggctggatcgatccagtagtctctcgcggcggcagcgtcctgtacatcgcaagccaagactcggcctgtcggaaggggacgcaggcgatgagccgtcagtatgaagcggaccggtgcatttgttgacgcagtctgcaggccggtagacgtaccttcgtcggtgcgggtgcaagcgacaatgggcgagcgcctacgaggagaagcgacggcgcggtcaggcctggctctcgccaacatcaaccgcctaggagaaacgtacctggccagacgggccgacaatcatttgcaacagtgtcgcagacgcagcgtctggtcgaatgttgtgtaagaggatctcgccagaccgatggccgacggcgacctgccggccatcgctgccgaggctgagatcctggaagaggcgatgaggaacggctgtcgagcgtccgtacgagcgcaccggtgcgagcatcatggatgaggacctgcaggtagcgcggtcaaggccgaggcgtcagaggaaaaggtaacaggcccagcgccgccgcttcggtcgacgcacggtcgatctaacggcagacaggatgagcggaggctccgacgtgtcatccagcgcaaggtggaagaccggctcctgtacaggggataggcagcaaggatcagcgagtgcagcaggccgacccgcaggcgggcaggcagctggctgcgcgcagacggcagcgagctcacctctggcgtgcctctgatggcaagccggccgtcgccgtcgagctctccagcctcccagagccagatgccttcagaggtggcgcagatgagaccgccacatttgccccaagcgagggccgtcgtcggccggtcgagcagggcagtcggcgaggcgagagtcgccggcgtcgcgagggcgagcttggtcgaggttgcgaccgcaaaggccgacaaggtgggcagcggcggcggcggcagcgtgggctggaggtgagctgaacgtgacgagctcaagctgtcgagttgagagcagagaggatgagaggagcagaggagcagaggtgagtgtcggcagtgagcgtcggaggaacggaggtcgaacgacgcgtcgagcagcgggcgaagacaggcgcgaaggcaagctcctgacgtcctttgccctctcgtcaggcaaccctccccgacacgggcttcgtgggagctctgtctttgcacgtgacaggcgtctgccgggtctgctggtcgatggggcaggctggaggaggtaggcagacaggcggcggcggcggcggcctgcgcagcgcgaagcgtcgccggtgcgcagcaagacgacgtcctgcaaccgctctctttgccctgcttgcctgcctgcctgctaccctgattcttgctttgccttactgggaggggggggccgctcgctagctcccgtacggccccattgcacctgccccccctccgccggtattgaggcgttcctcgtccgacccaggccggccggccgccccaacgccggcgctgccgggcacttgcgggctcgcatgcgtcgtgcttgccgggctcggctcggtctggggcgtcgagaggctcgttgctgctgctactgctgctgctgctgctgatgttggccggcctccgccggccttgccgctgttactgcgacctcttccgagcgccggccgctgctggctgccaccgccaccacctcctccgcccgaagcagcgtcggcgagccgctctgccaagctctggaggaatgccgtctggacctcgacgccgttcgacgacctgcactgaacccactcgccacagctccaaggcttgcccgcgctcgtctgcgtctggacgcccccccgtctctgctgccccccaccgggcgtagaggaggttgaggagagccgcgcctcgtcctgcgcagaacggacgaggaagcgcgcggcccgcgtgccggcctccatcgcttcgcggatgccgccgtcgtggcccagcgggaatgccgggcgaaggacggcccagaccgcgaggagcgggacgtagcggccggcgaggccgatcccgccaggaccgttgttgttggccgcggccttgccgaggggcgagcggggcgtgatcggctcgaacccgccgccgccgccgctgccggcaccgacgatcctcagcggctcctcgccctgttgctccatcggcagcgccaggcagtcggcatgcgtgacgccgaggctcgagacgacggcctggcagaaggcgaggcagcccgggtcggcgctgacgagccggtcgtcgagcttgcagcacatccggagccggaacatggcgtcggtctcattgaaggacggccgggtggcaggtggggtcggaccgaagccggaggaatgggtcgagtgaggcgacgagacgtgggagcggaggccgccgccgccgttgtggttgttgggcgctgtcgaagagttgaggcttccgccgccgccgccgcctccggagaacgagttgaacgacgagggcgagaaggctgtgtaaggcgacgatgacgaggccatcgtctgaggcgtcgtgatcgccagcagcgacgcgagcggatgatgctgctgctgctgggcatgcgagaggtgctgcccgcctccaccgtgctggccaagctgctgctggaactgctgctgctgctgctgctgttgcgccgctgccagctgctgctgagcggcatgctgctgctgctgctgctgctggagagcgtgctgctgctgctgaaggagctcaaaggccgtgttgagcggcgagtggccgtgggacgacatgccgtttgagccgggcaggccgtagatacctcctcctcctcctccacctccgccgctgctgccgctgctgccgccgaagctaaactggccgagggaagaggatgatccgctgccgttgatcttgccaagcgcggccgccgtggtttgcgcctgctgctgggcgaggtgctgctggtagaataagatctgctcgtccgtcatcggcggcaaagccgagggtgagcctcctccgttgccgttgccgttcccgccgctgaagctcgcgctggcgtgatggttgctgttggagagcgaggcgaggaaggctgcctgctgctggtgttggacgagctgctggtgccgcgtctggtgctcgagcaacggcgagccaccaccacctccgccaacgccggtcgcagaggtcgagccaaaaggcaacgaggcagaggacgaaaggtggattgggacgcccgagccgagcccgccgctgagcgtgttgaagcgacctgcgatccctcctccaggcggcgggtcgatcgacggcgtccgttggccactcgccccgccgccagtgagcagcccaaagtcgacgggcgagccccccgcgccgccgttggagaggctcgcaagcaacgccggggtcgcccgcgccgtctcggacgcatggcgtttcaacggccttccccctccgccgccgccggagaggccaagctccgagtcgtcgtccgccgacggcagcccgccgtccgactcgtcctcgtcatactcgtccggcccgccgccggctgtcgcaaaacgttttgcgcgtgagcggctgctgctgccggcagcgccggtggtcgtcgtgccgggggaggaggcgacgctggaggggtcgagaatcttgcctcggccggtcgggccggcgcggatcggctcctgaaggatggggcggagagcagggcaggcgagcagaaagggggggatgggggggcgggggtggaggtcgagcttgtcggcaggcaaggagaaaggagaaggagccaataagttcgagcgggacgtagacgtcctcggtgatcttatcatctctcctgaaccaaggagggagaagcgcggttcgacggcggttgagacgatggctacccggtcaaacttttgattatcccttggaggaagagggcgtgtgcaacaagctgacacctgacggccagccggggcgagtgagtaccttcgaggatgacaacagaataaaaatcaaggggcatggctacagtcccagaggagtgacaacgtcgtttcaggcggtcgtgctcgtcatatccgcatacatgtcgccctcaaccttggtgtcgtcctcgtcgagaatggccctgatctgcttatgctcgttcgcgctgagagtgatttcggccgaatcaatgttctcctcgaagtacttgacgcgctttgtgccaggaattgggatcgcgccgttatctacgacccaagcaagtgcgacctggccaacaatcagtcacccccttgtcttgaacgagcgcctcgagcttccggacgagcttgaggttggcgtcgaacgctttacccatgaggcgaggggtctgcccgcgaatgtcgtccactggaatgtcggtcggcgagagccacttgctgcctacgaggccgaagagaccacggcctgaggagcgaggacgtggaagtagtcaaggaggctctccgtttagtcaacaggatagagagtactagcaaaggggggagtaagcgacaatctggaccccaagctccccacagacgtcgaggactccgttggtctcaatgttggtcgtacacaaactgtactcctcctcgattgcagcgatcagtgcgaccttgtaagcccggcggagcgtctcagccgagacctccgagagaccgataaagcggattttaccctcgtcttggagttccttcatcgcagcgaccgttttcccgaagtctatctgatcgacgtcgagtcgcctaagcgaggccttgcacgcctcgcggacgtacgcccggtcgccccgtatgccccggaaggagccatcctctccccggacatagccaattttggtgcagataaagaccttgtcgtgctgcgtcttcagggaagaagcgaggagctcttcgttttgcccactgccgtacatattgctgcgaagagggacagcgtacgagggttattcaaaggcaacttgcagcctgagaacgactccagccaaagtacgctgtgtcgataagttgacgccggcgtcgatggcggcttgaatggtttcgcgactctcggcctcgtccgcggcgcccagaaagggaggctcggcggctctcaagccagccgtttgaccaaagaagggcggtacgcaccatagaactctgacaggcccataaccccgaagccgacgacgctgacatggccaccgtgaaagtttatctgccatggcgttgttcaaggcaagcggctgtcagctcaggtcaggaccacatgcgagccagacggcgacaaacagtgcaaatgggcatgcttggcaagagctgcaatgagatgcgactgctgactagcctgcgtccgcgattgatgcagaaacgatcaactcaagctcaagtggccggcctttgctcgtgcagctgaacgggctgttgagcagtaaagtggactggccggcttgttaaggaaagacggcggcgaaccgccttctggcggaaccctagccgtgtgagcagggagagaggtgcggccttaatattggccagcctgctgccccctcccaccattttacccgacgtgagggaccggcgaccggccggcggccggccggccgccgcgcgtacgtcacacacacacagcctatgatgacactcctaccgtgctctggctatcgctgccgttaccgattgtcactccggccaaaacgcagtcatgcgtccgtctgaggcaacgatgacatcaaacggtacaaaagagagtaagggaggaaaaaaaggaggagagaatgatagatctgctcaagtgcgtttgggcgttcttctttggcgattgctccttaagcacctgtagactctcagcacaacgtatcacctatatttagtaacgaagaacaactcgcaaagatgagagggactcaaaagtccgagctgagctgaaagagctcgaggtatccaagacgacatcggcagtctcgcccttgcccttcatcattgctatactgccttcatcgttgccaaactgccaccgccaagcgatcaatcgtcctccatcgcgacctcaaaccggagaatggtgcgtcatattttttcctccttcccttgccgccctcggccttctcgtcccctgccgcccctcctcccccgacgcccgatccgccaccagcggcacggagccggtcagcctcctcgccgaggatctcgccgtcttcgccgtcgcccggctggaggacgacgggcaggaggctcggggccggaagcgagccgggcgcagccgggccgggcgagggcgcgtcggtcgagcggaaatcaaagagcgtcggcgtcggcgggttggagctgcgcaatgagcagcgggaggggtatcccgtcagctcgggtggtgctacaagtggaagaagagcgagaagagggcgcgagggaagacgtacctttttcggacgagccgcccagcctcgctcgcccgccggctcagaccgacactagccgcagccccgccaggactactactccccgccacagcgccgccgccgccggccttcttcttctcgaggcccgacagcagccggccggggctgccaccaccaacgagcgcgtcggacggccggcgctggcggagtgtgtacgacgcagggagggagccggccgcgactcctcctcccggcgccggcgcggtccttgcgtgaatcgggatcgcctggggcgcgacgacgtgcgctgcctgccgggggtggatcgacaggcccaagaggcctagcaggcaggtatatgaggaatatagaaaaggggtcagcagggcagcgctgaatgcaagcaaggatagcccgagtgccagccccggcggccgcatccgagcccggcaggcggggagaccccgccgcctctcggtctttttcgaattgcggggggggggagtaaagtggcctctcccccgcgcgcgcggacgacaagagacaagaggagagaggacgatggcgacgacaacgcaccagacgtcgtcacgcccgagctgctcgcgggcggtgcgaccgctccggacgaagggaaggccgccgtcgccgccgccgccgccaccactttgggcgccgccgccgggcgcgccgctgttgccgacgactgctgctgcgggccggccggtcgctgctgctggcacgcgattcgaataaggtcgacaatgggccgaaggttcgaaagaaagtcagcgttctgctctcccagacgaggagcgggcgataccctcttgcccatccgctggtcgacagctaagccagagcacgacccgtgccgcccggtcggagctggacgtcggcctctcgctcgggacaagagacccggtgggaccggtcgcgccctctctcttaggtcagacgacgcacgcgcgctcgtgcatgatggcccgagagagaggaagagggcgcaaagccgagccaatgctcgcttgacaccaaggcggcgacatccccagcaggacaagcgagcgtgtgaggagagggagggaacgtacgacgccggtcgtctccatcagttgtgtggtgaagggtcaagggtcgagggtcgaaaagtcgggtgtatgcgcgggtgtatgcgctactggtggtgggtgtatgcgtgctggtcggatcgggtctggcacaaggtgtctgttctctggctcgaggtgtcgttcgaggcggtggtgggtgtttgctgctgctctcttgtcgcttccgggaggtctcggccctcgccctccgccgccgcgccctccgaccgtcaccctcgcatccccatgtcgaccccgtcgtccgtcccttcaaacagctcacaccctcaccgctcgctgacacacacccgtctctttgccagcgacacacagcacgccctcgattggctccggctcaccctcaataagcggcccgctgaagagctccacgcgctcgtcctcgaggacctgctcgagcggcccgacgcggtcaaggcgggccagatcccgctcgagcggccagaggaggcgccgctgagggtcgtcgagctcgatcgagaggtgcatgccggtctcgctcgctcggtcttatgttggaggagaatctgagccggagctgacgctcgctccgagtgctgctctctcgcagggcctcgtgctgacgttcagcccgctcggcgccagcgaccctacgctcctgtgcatccccttcgcctcacgcccctcttcgtcttcccttgccgacatcacacgctcgctcgacatgacgacgctccgctcgtcctcaaacaccgccggcgcccacagttcctccctcctcggctcgatcccctctctcccgcccctcccaagcttcacacgcccgccgctcctccctgagctcttcctcgtccttctcctcctcctcttccagctcctcacagccctcgcctccccctcctcccagtcgccacgggtactgacacttgcctcgtatacgccagatcatcgccatctgggaggatggcttcgttcgcgcacatgcagaccgactccgagcggcgtttgagcccctgctcgctggacagaagattgaaggtgcgtgctcaaggaccccggctgttgccctgctgccggctgacctaacgtccggccttctgttgtgtcgcgcgctgtagatctcgctcgcctgcgtcgcctcctcgagcgcgtcccggatgcattcgcgcccgcccaggagcggttctctttcgctgccggaggggccggtcaccgagtgacggcggcgatgacatgttgttatgaagcgcctctcggacactagaaccgagacctttgctgccttgctctccgctcaacgatgctccattctctgatccttcgactagcgtccctagtgcctcggccgtgctttccgcgattcgcaagagaggctgagaaaagacgttcatctgcagctccgagtccggcttgcagtgcgcggatccatcggagcaaaggccggcccgcgcgcgcagcagcgtgcagctcggcccaccgcgagctgccggccaacgcccatctctcgcctctcaagcccgacaacccctgtgcaggaacgcagccgcctgaagaggcatctctcggcgacagaatgacgtgctcggaccgatatctgtgcgtagcggctctgcaattcgacttcgtgcaggcaagccaacacggcaggcagctcgccgacccctcctgactcaccgggtcctctcctacaccaacagctcagcaacgccggatgagctcgttgcattcatctctggaggcatcgctgcgatccttgccggcttcaagtgcgtcatgccgaccaaagggcgtcgtgccgcggacgagcgattcgtgcggacggcctgccccgcagacgaccatggcagcgacctgactcgcctctttccctcgccggctttgaatgaccattgatcttgagtcaggaccgagtgcggcatctccgaggcttaccgacacgccctcagttcggctattctcgaggccgagtcgatcccggtcgaggcccgctgggactacggtgcgtcaggctctggacgtctagttgcaggcgcccctgaagtggagggctgacacagggctacgcgctgaagatcacgttgagatctcaaggactatagacatatacctcgacgccggcattgacacacacctggagcgtatccagaaggttcgccactagtcgcctgccatcaagatgacgaccctctgccccttgactgaccagctcgacccgcttccccatctcttgcaggagcttttgccgctagaaggccacactctggttcgaaactaccacgaccgatggacagctttcgatcgcgctgcagactacctcgaccggctgttcgagcatcacaaccgccattgggtcgcgcgtgaacgggccgacggcgagtacgctgtaaacgatgtccgggtcgtacgtcccgcctgaagcgctcttacgactgctgatgctgaccttcatcgggacgtcgctcgtgcagaaggcgctcctggactggcgcgactcgctgctacctgtcgtacaagctcggctctcggcagcgttgctcgagtcaatcgcaagtaaccgcgccggccaatcggtcgacatggagctaatttatgtcgcggtcgagtcgctaggtatggtgcctcctacagtcgacgctttacctctgtgcgaggcgcgctgagcctgaatcacgctttctccagtggcggtcagcatcgacgaacgcgactacgacatgcctctcagcctcgagctctacaatgaggtgctcggcgaccgtctcccagcggcagatcggccgcgctttctacggctcgtcgaggcggcgcgggggacgagacggtggccgggcgaggtccgacttgatgcatgcgccggttgatcgtgggcaacgtcaatgaacagtcaggccgtcaagggccagacagatggccgtctctcctcgtgcaaagatgataccgcccaggtgacgtcggtcggccccagagtccccccgacaccccctggaccctccggacgtccgtgagctcgtctgaaaggacaaaaagtgatcgtaccgtgactcgaacacgggtatccagcgtattgaggtggaccacaagctggcgctctaaccacctaaactatacaatcaacttgctttaaagcaattgttggagtcgtgcgtaaaaaacgggtatataaagtgtacttccgagagggggcaaaggcggtggcggagaggggtcgcagctcaaggactgcgtacgtgctctgcgagaaacgagtgaagccagaaaatgggggggggcggggcagaggacttaccggattgctcctcgaccccttgcctaacctcagcccattgatactccccaccttcccccctccacccagctcgaccgacccgatacagaacacatcgacccagacatttgccctctcgagcctctccagctcggccaactcggacgcatagcgcatgcccgccgcggccgcgcgcgcttcgagggtggatgtttgcgagagggagagggcgtgggcgtggatgagagattgagattgggaggtgaggtcggacgaggtcgtttcgagcgtggagagttggagggtgagggtctggagggtcgattcgagcgtgaggagctcgtgccgggcggtgcgttcggcagctgtcaactggggaaagggagcgatggagtggagcgggaagggtgagcgagagacgccaagggggagatgcagaatcccggcgagcgagcgagagaaaagcaagacgcgcaaacgcacctcttcaagcctcctcttcagctccagcccctcccccttcctctctcctccgctctccaagagcctcctctcaaatgcgacatacgccccgcgctcctcactgagctcggccagccgctcgtcgagcgccgtctggaggagccgcgcgcagtcttggcagagggggtggtccgtgtccgagttggctgaggcgagtgtgagtaacgcggcgggagagggggcggagctgggagatgggcggccggcgtcgggtggcgggttggagggcgagagggtggacgaggagccagagggaggaggaggaaagacggccgactcgccaaggaggataaacgactcgccaccagtccctccttccgcagtggcgcctgaccccgcccctctccggcggtcatgagcaccggcggtcgctcgccgcgcactgacagcgaggaacgcctcgttcgctgacgatctcgccgacgagggtggtgcgagttgggcaagtcgctcggcccggctgagggcagacggcgggcgagcgggcgggatcgacgctttcgtgttgagcgcgagtcgcagattgggcgcgaggtgtcagcgtgaggtttcgagcagccgggatgagggaaggaggggggacggaccggcgagaagagaggagtctgattcgaggacggtcgagagtgggagtagcggctgggcgcggtagacagaaggagagaggcgaggaaggtcagctgcgcgtgcgagacgagagcgagacaagagagccccaaaccggcgtgcgaggcgaggcaagaatgacgaacctgcctgcagctctggcatgtcgtccctgagctactggtcgccattgtcgggcgcatacagccgtgtgcgagagtaatggtgctgctggtggagatcgttggtgggtcgtcggaagcagctcctgccaagtcacgtcggctctgctcttcctccagagcaggaaacacacggccgcttatcgagtgccgaggccgagctgctggaatgagttcttggccgtcttgatgaggaggctctgctgtatggagatggctggctgggtcagtcgagcgtaaggcaaagcaagcaggccagggccatctcgctccctccctcgcccgtcgtctctccctccgctcgcccgcgcgcgctcgccggccagccgcccgttttcgtccgccgcccctcctgccctccctcaccctctctcctccttttcctctccttcctcgcagccatgttcgccgcccgcactctcgcccgcaaagctacgccctcgctcgtccggtcctacgccgaggccgcccctgctgctgctgccgggtcgaagctcaagctctcgcttgtgcttcctcaccaggtgcgtgtcggcgggccgacatcgcccatcctcctcttcggggccctctagctgacaccctctctttgtcccacgctctttcgctcgctcgctcgtccacccggctgctcgcccgcagacgatgttcgcctcgtccgaggtcgagcaggtcaacatccccgctgagagcggcatgatgggcatcctcgccggtcacgtcccgacgctcgaggcgctcaagccgggcgtgctcgaggtcatcgagagcggctcgaactccaagaagtggttcagtgcgtttctggccctcttcttgctcttggctctggttttgttcgcgagagggagagggagggacagagggcggaccgaccgacccaacctaacgaggagctcagcaagctgatcacccccccccccatcccgcccgccgccagtccccctctgctggcctgccaactcctcgactgcacttgtagatacgatgcccccctccccccctcttctcgcctgcctctgaaagcaagcgcatcgtgccctctgctgctgccgtcggcttcgtctcctgacctacactacgcgtccctggccggagcgtacgcgtcggcgcgtcggtcgatggacggggcccgcttttgaagatcaattgacctgaaggagccatgaaggtcaagggtcgcgttggagagggccggcggatgggctgggtaggcgagatagggtgagacgagcgcaatggccaccagggcaacgttaaggaacatgcttgagttcggccgacggctgggagggagtgcttggccaggggagtacggagaggagaagggcttcacgagaccatcagcttgccgccattttatggaggccgcccagcagacgatcgcccgctcgcaggtgtcagctgaagcccccacgggcagaggtttcggtctcgcaaagaccctgccttcgaggcttgacgagagacggaagagagacgcgggccagggcgagcaggcgtccaagggccggcggacgagctggcagcagtgtgcatagagatcagaagagggccgggacgagccgggcgttggagatagtgaggcggtagggggtcggtctggttgaacctctggaagactggacgctttgcttttaaaggacagagagcgaagcagcgtttgagttgatgccgagacttcgggaggcattcgagaggcgttcgagagccaggtcgtagccaagagagcgagtgtcgtgtacctcggcctcgaacgtttgattaaaatcaagattcgaactctacgtatctgccgcacagatacgaccccggctggagaatgcagcaggatcaggagggcggcaagcgttgagcacgtcgttcagcgacagccgtcagagcgcctcggaacgcagcaacggcgcgtaccgaacgtgcgcgcaggagtagcgcaggcttcccagctcgaacgcgaacgctcggtcaatgtccaaagtgtcaaacgggcgcgctctcgcctggcatacccacagtggcttgggcgcatggcgagaaggggcgggacctcggcgccggtctcggccgcagacgtcgcgccttcccgtgcggcggtagtcaggacaacgtcagccgggcggcgagcacacgtcgcaaggcgagaagcgagcggtcgacggccgacctgcgagcatggcttgagttgagctgctgctgatgcagagagcaggggagagcagcgggcgtgggaggcggcgaaggtcgcgaccgtggcgagccgagcctaccctcgaccgccgccgaacgacgaggagccagagcgaccgaccgagagcgaccgacttaaagcaggagtgtcaacgtcgcatgtccggtcgtgagctagaggcaggagagtcgggcaagatggctgccaggagcaagggccgagctgccctcctcgctcaagccggtctccgtaaccctaaacccgctcacccgcagccaagagatggccgacgccgccgacctgctgcactcgtcgttcacccttgcctctgccttgctctcccagacgctcgctaagccgggcgtcggctgctgaagccccgcttggctgcctctgcctgtgctcgaccgcccggtcgaaggcgccgttcggctcgccggctgcagctcgagctgctgccagctcgtccgccggcccttggacgcctgctcgccctggcccgcgtctctcttccgtctctcgtcaagcctcgaaggcagggtctttgcgagaccgaaacctctgcccgtgggggcttcagctgacacctgcgagcgggcgatcgtctgctgggcggcctccataaaatggcggcaagctgatggtctcgtgaagcccttctcctctccgtactcccctggccaagcactccctcccagccgtcggccgaactcaagcatgttcctcaacgttgccctggtggccattgcgctcgtctcaccctatctcgcctacccagcccatccgccggccctctccaacgcgacccttgaccttcatggctccttcaggtcaattgatcttcaaaagcgggccccgtccatcgaccgacgcgccgacgcgtacgctccggccagggacgcgtagtgtaggtcaggagacgaagccgacggcagcagcagagggcacgatgcgcttgctttcagaggcaggcgagaagagggggggaggggggcatcgtatctacaagtgcagtcgaggagttggcaggccagcagagggggtgctggaattgaggttcaatgcgagcggcgggggcgaggcgagcagagcgccaggcagactcgctgatggggctcgcttgtgccgagcagcaagccgcgagcaggcgctcaggacggaggagagggcagaagaagggtcgagaggatgaaagctcgggccaaccagcggccagcctatcgtcaggactcacgagctcgcccagcccatcagcgggttcacccagcgcccgccgccagcaagcgtgtcaaaatcaagccgccagtggttgtagcctgccttgccagactgcatcgtgctcggcgtcggccggaagatacgaacggtccggtgggtgagggcaggcggagcgccagaggcaatgccgctgagcgttgcgtgcgtgccggtgaggaggggaggagagggcgtcaggcggcgttctcgcttgggataggtgaatgagagtaggaaggaaggaggacgaacgcctgggtcagggtcgactcgtcctgctttgtgctgatgatgcccttctctgcagggcgttgaaagcgagcgagcgagcgagcaggggtggtcagccagcccctctcccagtagtcgagtccgatcaaagcaagcacgcccgagcgaacacgcacgcatctgggattgatgagcatcaatggcctttgagccggccttagcgagctggcttgcagccggcagcggtgggttggtagcggcgagacggacgagcgaggcgcgcatcataaggagggaagggtcgaatggggggtgagggagaggagggggagagtcggcccgcgtcgacccgccaacgccgcccgccccggccgtgtaacacaagtgttacgtatacacgccccgtaacttccgcccagactcgactcgctctcgtcaaccagctcgcaacctcgacgccctccctccagcaccaggtcagccagtcatgtcgacctcttcgtccgccaccgccgccgtcgccgccgccggcccgtccagctcatcgctgccgtccactgccgaaagtggcctgcgcataacggtcctcatctccggctccggtccgtcccttcctcgctttctcgccctcactcttgccctcgctcacacctgacatcccctcccctttcctccctcccaacaggctccaacctccaagccctgatggacgccgccaactcctcgtccctcggccccaacaccgcaattacacatgtcatctcaaaccgctcgcaagccttcggcctcacgcgcgcacggaccgcaactcccaattcaattccaacctcaaccctcgcgctcaagacgttccaaacgcgtaaccccggcgccactcgggagacctacgacgtgcatcttgccgagctcgtcctcagtgaaaaaccagacttggtcgtccttgccggctttatgcatatcctctcgccgacgttcctcgaatctctcccggccagcctgcccatcatcaacctccatcctgccctccccggccaattcgacggcgcgcgtgcaattcctcgtgccctcgaggcgttcgagcgcggcgaggtgaagggaacgggcgtcatggtccatcgggttgtagccgaggtcgaccgaggtgcgccagtgtgcgtccgggaggttccgatcgagcggggcgagacgcttgagaggcttgaggagaggatacatacggtggagcacgagctgatcgtcgagggcgcgaagagcgtacttgatgagatccgcgaggagcgccgccgtcggagggtggatgagacaacgacgacgacaactacattggaatccaacaagagcgaggacggcccttcaccgacgacgacgacacggccagcagcaccgaccgacttgcaagctccgtcttcttcaaacccgcccccagcagcagcggcagcaccagaaaccgctgctgacgcagacgcaggcgccaagacgggcctcgaaacgctcgtcggcaagctgcgaatcggcaaggccggcgcatcgtcgtcatcgtcggcgaaggtcgggcagtagggagcgagttctaatcttatactcgattcaaggaccgcatgtgtccattctctgcaccatgctttcttgcggcgcgaggacgagggaggtttgggtacgagggtgatgtttgtgggagagtgtgcgaggacgcgctccgatggtctccagatagagcgacgctccccgtccccctcctcctttgttcaagtatctcaagagcatcgtaagcgcgcgtacgcgcgcttacgatgctcttgagatacttgaacaaaggaggagggggacggggagcgtcgctccgaaaagagaggggggggaggtggtcgacggcggggtaggcagagggcgagagggtcaacaaggccttacgcccgacggcgcccgcctgtgagcctttcgctcgcccctgttcagccagagaggaaggtcagcgggcggccgaccgcgcacgccatagtcgggaaggtgagtcgggtcgtcgggcgacgttcaaggaagcaaaaagggccgcctgcctgctgcccggcggtgagctcactccaaaagcaggaggggggaaaggaaacgaacctggaggcgggttcctgctgctcctacttctgctgttcctacttttacgtgagggtcgccgagagcaaagtggtcggggttacttgcgcgcgcgtgggcagtcaacaagggggaacgagccgggttcgagggtgggtgtaaaggaagcgaagagggcgaggaggccagccatgagcagcgaagaggcgggcttggacctgcaagactacatcgacctccggcgtcgtgcatcaatgactctcgctagatcgcccgctgcactcgcaaactcgcctaaagcagcgacctggatgagcaggacgaaggtgactgtgagacttcatggccgagagcgacgcctaccgttcatcggaggagcgaaggccgttgcaggaggcgagcggcggcctgacgagacgacgcgcgcgcgcgtctctgggcgcggcgcccgcgcagttcgacgcgccggatcactctgtcgtcgaccacgacctcctcctcttcgccacctcgctatggatctctcctcctcgccctcgccgctttacgatggcaaagtcggcggcaggcagaccagccgaccgccgtttcagccctcgtccccctcgccgctctaccagtcgtcgcacgcctcgtcctcgcgcgccggctcctcgcacgcccgcccgtcctccgccactcggcggccccatcagccggcttcccggccattgtcgtcacctctccaggggtcgagccaggcgcatcgtcggccgaatcaacgctcggccagccatcacgtcacgcttggcggcagccgcggcggcatgctctcgtcccctaccgccggcccctcccgaagcggctcgagctcctcctcccctcgccagggcgctctcccctcgctgcacggctcccaagcctctacgttgccgcctccgacagtcgtcgacgtcctctggcgcgagcgcttcaaagcgcgttgttcggaccggatcgagcgcgagcgcgcgcgggccgtccgaaacgagcgcgagcgtaagggcgtcgtctgggagagcagcgagggcgacgtcggaatggacctcgatgacgacgatggtggcgaggatgatgacgaggaggacgaagagactgagaaggaggtcggtcgtgcacgagcttgcctttcgctcgcctcgacggtggaagctggctgcgcagtgaacgctcttcttgctgacccctcccccctcccgaacgtctcggccgactcacagatcttccgccggatcatcaactctcagctccggcgacaggcccgcgagcaagcccgtggagccgaccgcgcgctcggcggcgcctcgctcgacgccttgctcgaggacgaggagctcatggcatccggctcgacctcgcctgccgccgccatccgggaggacatgatggacgaggccgacctgccagaggccgacatggaggacgcgtacccgctgggtgaggcggacgacgagtcggcgctgagcgacgaccaagacgacgacgcgcttctggcctctttcgacgaaatcgacgacgagagcttggaggcggcgtacctcgaggtcctgatggcggtcgagtcgcgtgcgtcattcgtctggtcctctcgcccaccagtcaagtcatcaagctgacgaccttcatctctcctccggtctttgcagagccagccgtccccgctccacccgcagcgcccgtcccttcgcgcaagcgcataacgaggccgccgaagccatacctctcgccgcccctctgccctcgctgctgggccacatccccgataccgacccgggcgccttcgcaccggcaccggctcgtgccgacgcgatctggcgggctcgaatgccttgggccgtgcaagtaccagatgccggtcgagacgtcggatgtgctcgtcagagcctgggaggacgtccctcatggcggggaggcagtgtacgtcgcccactacgagcggacccttgaccggcactgctcctcgcgcttgctggacggtaccctgtcttccgtctcccgcacgttccccccccccccttgcgcctccacagagatcacggtcgagtcaatgacgaagctcgctgacgagatcttcaagcggctccacatcacgacgctcgtccacggcaacatggagaaggaggccgccgtcgagctccagaaggtcattgaggacgtcctccagcccgagccgctgaccgaggccgagaaggcgtccgacgtctcgctcttcctgcccaggggtgcgtctcacagtttcgacgaggccgtctatctcgaaactgaccacaacacctgctgtcagcctcctcgctcgtctggcagattccgctgccgaacaaggtcaacccaaactcgggcatcgactactacctccagatcggcccgtcgaccgacgaccgcctccgggcgctcgccgcgctctttgcacaggtcgcacacgagccctgctttgacacgctccggaccaagcagcagctcggctacctagtctcttccggcggccgggcccagtcgggcatggtcggcttccacatcctcgtccagtcgcagaacgactcggtctacctcgagaactgcatcgagtcgttcctcaaggagacgatgcgcgagagcctcgacaagatgacggccgaggagtttgaacgccacaagcagagcctgatcgacaagaagctccagaaggttaagaatctctacgaggagtcgagccggctctggcgcgcgatcggcgacggcacctttgactttggccgccgtaagtcgcatctgggcgtctgaagcaagagtgacgaccgcagcggctgaccttcccaacatcccacccaggcgtcaacgatgccgagctgctcaagacgctcaccaagagcgagctcgtcgacttttacgagaagtttgtcgacccggcctcgggcgaccggcgcaaagcctcggtccatatccggacgcagatggacccgtcggccgcacccgtctttgacgcaacccttgccgagcccgtcgtcgccgcctttgcgacgcgcggcgtgcctgccgacgacgccgcgctcgccgagcttctcgctacccagccagctccgtcggctgttcagaccttcttccgggccgcactcgacgccgcgcctgagtcggtcgccgccgcagccaaggacgagctcgccaaggcggtcgacgcgctcgacgccggcaaggcgcgcgagaagaaggagcctgtctgggacgagcgcaacgtcctgatcgaggacgtcaagcagtggaaggccgggctcgccaagacggagccggcgcggccggtcgtgccgctagatatctttagagtctgagggccacgctcctttgggactggctagaggagggtttcttcgcatgggaggagtcttgggcagcggggggggctgcatcatccatcacactgtatccatcgcacgtcttcatgggctacacccatgctcgctgcgaggagagggactggaaggccggcttaccgcgatgaccgcgatgcgaacagcgtgtggcaagggccttcgtcgtcggttggccgtgcgcggtaccaagcgacgtcgaacgccacctggtcgagtgtcgcgatcgtgacgtagaagatgacggtcgaggccgagaagacccagccgaagatgacagctccgccccagagggtgtagttgcgcttgaagaggtcgctcgcccagccgatccaagggtagtgggcggcaatcatgatggaccctgcgtagggcagtaggaatgaggtggctcagtttccctgccgacgtcggctgcagccacatggtcgcaccgatgatgaccgctgcgatggtgtagtcgccgttcgacgccgacaggcggcacggacgatagatctcgtcgtcctcgctgcagagctcgccgcccaccgtcgtgtcggagtgcctgggctcgtcttccgccgctacggtagctcgaccagcaggcaggagcagcggcgtcgactcggtcgccttctcgaggtcgacaggcggagcgccgacggagacgacgcggcggaagaaggaggtcggagccatgttacgcgatgagacgctggcaagccgcgggacgaacgattagcttcggcgtgtgaggagtgcaagcagctgtgaggggtgctcacctgatgagaaggaggtgtggatggcagagggtggaagggcagaggggggcagggcaggatgggtgtcgacggcctctccgactgccctcgccctcgcccgctttgactggctcgcacggaagactcgacgcgtcgacccctcccgccctcattgagcctgcccccttcctccgagggctctcgtccagaagcaaaggggcgtcgcaggccgctgtttgcccgtatgcgaccgatgcggcgtcaaccgaccgaccgaccgaccgaccgaccgaacagccgagggctgagcatcgccgcccgcccggcccctcctcgcgaacggccgccatactgagactctcaaagccaaagggcaaggaagaccgagaagcgcgttgcaagtggaatgtaaaaagaaggacgtacccctcggacatgtcggcgttgagcagggcgaggtacgactcccagaggttgccgacgaccttgccgcacgagaagcagcggacggggatgatctgtaggaacggagagggcgggacggatgaagaggacgtgcgagatgagggccagggaaggccaggagggagggagggaaggaggacggcgaggcgagacgagcgaggtgcggcgggtggtggacggccggccgagagagcgcgggtgcgggcggaagcgcgagggacggtcggtcgggtaatcgattggagggtcgagtcgagatggccagaaggaggaaagggttgagtagaggagcacgggaaaggtcagcctcttgctcgagctcgacgacgatggctggcgtgggctgggagggagggaggagtgcaggcgtgtaggtcgagcagccggtcgcacggagcgaccctggagggcggctcgatacgtagacggcctcgatgaaggtcacgctggctctgtcactcgcgtctctttatgacaagagacgactgaccatctttgctgggctggctggctggctggctggctggaggagagggctgaggaccaagagccgacgctgcctgcgcgcgcggcccgtcagaaaaatcccttgcctgggtcgcgcgcgcagtgcctagtgccttgccttcctcctcctcctccaatccatctgcaccctcagccatgttctccttcggcgccccctccaccgctccgaaaccaacgtcctccctcttcggtaccccggctcaagcgccgtcgacgccgacgactggcggaggcgggctctttgtcaaccctcctcacgcaggatcgggcggcgggctctttggcgggccgtcaggccagcagtcgacgggcggcgggctcttcggccagccacagcagcagcagcagcagcagcagcagcagcagcagcagcagcagcagcagcagcagggaagctcgacgcccagcaccggaggggggttgttcggccaacctgcccagcagcagcagcctgccggcggaggagggctatttggccaacagcagccgacgaacactagcacgacgaccagtggcggactcttcggccagcctcaacaacagcaacaacagcagccgtcgtcgtcgtcgctctcgctctttggccagcagcccaagcccgcccagcagtcgtcgtcgctatttggtcagccccagcagcaacagcagcagcagcaggcgggcgggcttttcggctcgcaacagccccaacagcagcagtcccagcaacagcaacagcagcagcagcagcagcagcagcagcagccccaacagccccagcagatcgacaagacgacgaaatttgtcgacctgccagagcacgtccaaaggacgatcgagcagatcgacggcttcatcgtctcgcaggtcgggctttcgcaggcgggagcagtccatccgctcgcgtcttcatcgttgtcggagggcgggccggaggcggtctatggctcggcgctcgatcggggaggaagctcgacggcgggatttttgctcggcgcaggaggaggggcgatgggcgtcagtctggcagggtcggtcgcgggccgggcggcgagggccgaagggctaccttcgatcccgcagacgagcaagctgtttgaccggctgagcgcggtccgtccctccctctctccaccacttcacctctcggtcgttttgcccgaattgaaggctgaaacgctcgcttgcttgcccacccgtccgctcgcccggctgcaggacatcacctcccttaccggccacctctccaccctcacctcctccctccacgccctccacgccactctccaatccgactcggccgacgccctccgcggcgcgcgcatcctcgacgcatcccgcacgccccagggccggcagggcctaaggggccaagcgcgctttccgacagagttctttacgaaggtcgcgagtgcgctggaggagcgggtggggtcatacgagaggacgctgacggtcagttccccctcctcctttccagggggaggagcggcggcggcggcgggagcgggcgagaaagcagcagcagcagcggccgacatcatcgccggcgtcgtcgacgtcgcgtaggccagctgctgggtggccggcgcaggcgactgtgatggtctgccacccatctgcagctgctgctgctggggcgcgccaccgccgacgccggccttcttctccgccttaagctcgcgcgcaagctgcctttgctccttgcgcgtcgccggcggcttcttttcctcgccagcagcagcggcagcggcggccgacgtcgacgtcgtcgacggccccgatgccgctcctccgggcgagatagagtcgccagccaccgcctgcgcttgctggagcccgacgtcgagcacgccgctcgccatcagctgctggagcgcagcaagcgacgccggatcgagactcgccgcggtcggcatcggcggcagcgcgctcgagctcggcggcggcgccgggcggtcgacgtccatcggctgctgctcggtcaaagacgttccagccgcgggcagcagcagcgacggcccgccgccgccgcctccgccggcatcgtgcagtgccggagccgagtcggacgtgttgttgccctcagccttcgccttcttcttgatcttaatctttgcaagcgacgcctgcgcttcccccggcgtcttcccatgcccggcagacgctccgcctccacccgccgccgccgcagccccagcagccgagtgggctggcagagcggccttggcctggcctttcggtggcgcgtggccatccgagatgaggtcgtcgacgagcgcgtggaacttctgcttgagcgccatggcgtcgatcgcgctgcatgtgggcgtggccaacatctgtcagccaacacaccccttttgcaacaaaattagtcaatcaaagagaagcgcacatctggctctcgtccatgttgaagacgagcgcgttggagaagatgaggtcgacgtcgtccgcgagctcatcgaccgactcgtagtccctcctcttcagtttttgctgcgcaaccgtcaaaacgcaggaccaaaaaaaacaacgggagggtcagactcgtgcgtgtgtgggaggatagaagagggggggggcggacggacgtagatgaggttgaacgacatgggcttcttgacaatcttgtagtagtcgggatactgcgatttcgggatcaggtccataaactcgaaagcgaggacgcggccgctgtccaagccaaacgagcaagcgccgggcggtcagttctctcctctcgagcagcgcggcaaggagcgaggaagagagagggggcgcacgtctccttctccttcatctgcgtcgtcttgtcgagcttgttcttgacaaccttccagacgtccggcgccttgttcgccttcttctcgatcttggcgacttttgctttcgcctcgacctcggccgcgagctgctggcgcgctttctcctcggcctctctgcgcttcgtgtgctgattctgggccttcttgccggtcggcgctgctggcggagctgaatcgggcttcgaagcagcaccggcctccgccgccgccgcagttgaggtcgacgcgccagcggacggcgggagggcagtcgctggcggttgggctggcagggccagtgcgtgagccgccgttgtcgttgctggggtctgagcgagcggcagagccttgtagtctgggtggtcggccggcacgagctgagtgtacgtcgtctttgcgagtttctgccaacggcggcggcgcgtgcgctcgcgcgagagtgagcgatcgtcggactcccccgcccgctgagggctgcgaagagggaacgggggaagggaacgcacgtgcagggttttcgcgtcattgaagatgactgagccttttgcgttgtctgccgtcgcaaggcaccgagaagcgtcagttctctccggatgctgcgggcgagcggcgaagcgaggggggaggagggacgaacagcgctttgcattgacaaagcagtgctcgacgtctgcccggaccgcatcaaacgtcgggtactcgctcgccttaatctttgcctgctcagatcatcaggggctcgcggcggtcgtcagcaggcgagcccacgctaaagcaaggtggaaggggagggacctcgatatcgtcgagcgcgaccggctgcttgatcacctcgtagtagtctgggtagagccgcttattcggcagcttgaggaaatcggtcgcgattagccggccgctaaagtcgtgcgagggagggggaggggggggcgggggcggaggctggcctgtccgatgggttgagcgaggcgtcgagcgtcgcggccacgcgagcgtgcgacgaagcccggacaacgtccaccctccgagcgtcccacacccgcccacacgtgcgctcttgcgcgccgctcacgctcgctgcgaaagaaaggagaagagagaggccgaaaactgacccgcctcgtgccggtaaagctttttcgggtccgtctcgcccttgacggcctcggggttgcgcgtgcagctgacgttgaggttgaagacgaacgtgttcatgtcgtttgggacgtcgcctgggcgggaggagcgcgagcgagtgagcaagcgagcagggaggcgtgtcagcgcgagcagcaagggcaagggaagggagagaagggagcggcaaccgcgctacacaccgagcttcttcatccggaccctcctcggatcgactcggatcggtacgagccccagccgatgtgcgagcacctcgtcctggacgatcgacgtgttgttgtacatgaagacgtcctcgatcgcgacggtcgggacttcggcgatgaggatgcgccggagggcgttggcgagcgaggggtcaaggtggaggatgtcgagcgagatggaggagggcgagagggagttgatggttatcttgcgggactaaaggaggaaaaggggggagggacgtcagcggcacgactcttcaagttgcttgatggatgctgtcggccgctgttgcccctgcctctgcgctcggtcaaacccgaccggccagcctgccgtctctcgctcccccctctcgcccagtcagccagcctcagaccatcgcccgcgcccttcttccttatccgcgaacacagcagcaagagcctgtcggctctgacggcccaaccctaacccgacaagctcagcgaggagcggaagtaggggactcacgctcgtgaacttgcggacgtcccacgtatggtcttcgcccgggtaatgtgctggaaagtcagagccaccgatctggtgcgtacacgagcgaagcgggggcgagcgaaatgcgcgaggtgaggcgagagggagagcgaaggagcgggcgggcgagggcgagtgtcagccgctttcgttctcttgcaggcaggcaggacaggactgacgttggcaactcgctcggcctcgagccggacgagtcgacgggggtcgacctggtcgtgattggccatgctgtctagatggtcagggtgtatgcgctgctgctgctgctgcttgaaggctgtatgcgctgggtcgagggtgagagacgagcgcagccgactcaagtcgaaatcgccccgaccctttattctttttttcctcgatcgctctctcgccctccctccgacctgcatcctcctccctccctccttcatctctccctctccatatcctcagcagcaatgtccgaaggcgcctttcgcaagcttaacatcgagtttcgtcctcttccttcctactctccttcaattaagcgctgacaccgtgctgccgtacgtagccagtacgacgaggacctccttgcggcggacgagctgtttgagccggacccaaggtcggcggccgaggccgaggggtgggcccgacaagtccagacggaggtcaggcaggtcctgggcaggtccgtcccacttgctttctgtccttctatggctcgggtgggtgagttgtttggtggggcggcggccggcagccaggcagacaggaaggcaggcggcatctcgcgtcgtacgcgctcggccgacgctcggcgcctctcgctcggcgctcggcagtcgaatgacaggccgctccaaggcggtgcgcacgcttgtcaatgaagggaggtgtggcgaagcagagctcaaagcgccgtccgtgtgctcagccaagccaaaagcaacaggctcgggtaagaggcgccgccatcgcccgacgctctcgccatcaccctcgcactcacccttatcccatccaccaattccccacctaacgcccctttcccctcttcgtctgccctccgacccgccttgcgcaggtccgacatcgccggcgcgctcaaggcgctcctgaccgactacccgtttggcgccgaccatgatgccgcaaaggtccgtccctcctccccctctgcgcgcatgactctcatcggcggtcggttgcttgcttgactgagggcgaggcgagggcgcgaagaggccatctcgagccagacgagccaacttcatccccccttctccccctttccgatgcgctccttgtcgggcgtcgtccgaggctgccggagccgggcgctgaactcgagggcctcgcggacggtcgcctgcggcaggtggacgtcctgctgctcgcagtagccggttgtccgggtgaaggagatcggcagaggcttgccctcgaacaggacctcgcccttgatctcgccctcgtccttgcggccggccaggacatccatgagcgtcgtcttacccgcgccggacgagcccatgagagccgtcagctctccagcctgccgagaaaaagaagcggcgggtcagccttcgcggcaagggtcgggctggagcagtggctggcgcaccctgcagtagcccgagatgtcgttgagcaggtggatgttgttgccgacgatctgtggcgcgcgtgcattcgaagtcagtctctggccaggacggtcgagcaggctggcaggacgcacgtagttgaggttcttccaggtgaagacggcgctcgccgactcgatgtcgccagtcgtcttgccagacttcttctcgccttcgcgggccatgtcgtcctcggcgaccgtccgcccagagttgaacaagggtgaggctgcatcgacgggcgagcctggacgagtcggagatgaggcaccttcgcgctgctggcggatatacttcttgccgccgccgcgtttgtagagcaggacagactctgcggaggtgtgagttcgtcagctacggctgctggagggcgatgcggagggcgatgcggaggaagaggagtgggcggatgacgcactcttggagccggcggcgggcaagcgctcgacctgccagacgttgataaggcagatgaagacccaaaaggcaacgacgataccaaagtttcgccagatgtgcgtcttctcaaagttgaaggcctgggagaggtaggccgaaccctcgacgagaggcgagccgggcgtcgagccggccatggcgcagccagcgggctggccgccgtacgacgggccgatcgggatggtgctgcgctccgagcactggtagtcgacgccggcaaactcggacgccatgatggcctcgaaggaatagaagagcggattgatccagcgtagccagccgaaccaaggcttcatctgcggagtggcgatggctgcgagagggaacgattggcgaaggcgcgagtcaggcgcgagcagagctcgaaagcaaaggaggggaggacggaccatagccaccatacgtgatgaagactgaaaaggtcaagccagagactgtcatcggtggttggggtgatcgagtgtcagtcgtgcaggcgcagctcagcttgcaagcgtgcgtgggaacgcacccttcgacgcgtcctggaagttgtcgaagctcgagccgacggcccggaagaaggccgtcagggtgacggtcgatgagaagttgaagagcaggaagatgaagactggttgtgggcgaggaggggagtcagtggcgtggacgagaggaagggaccgccggtatcgcaaggcaaggactgacagtgaccggcggtctggcgcaggttggccaggaagaagatgacgatgctgaagatcgattgcgagatgaagaaggtcgggaggtctgccagcgtctgcgcaaagaagagggcggccggccggtagaggctgaagccgttgtgctttgcgaggatggcccgaccctcgaaggcggctgtcgtctcggacagcgtgccgaccgtcggaaagaggagcgagaggaagatggcgccgatgcgaaggaactgtaagggcggagcgaggatttgtcagtcgaaggcagccgtcggtacgagaggaggagagcgcacgatgtcattcgtctcgttttggagattgtagaagaccgagccgacgacgaaggccatgatgaaggtcgttagttgccgggcccagaaggtcctgcacgaggagggcgagggccagtcagcggcagaggtcgtccagcccgtcgcgaggggacgacgcaccacttgtcgccccagcgctgctggacctcgcgccggagggcgatcatcgtctgcgcccaaatgccgaggttgtgcggctcgcgcttcagcgcagcgtcgtgcttctcggcctggatcgccttttgcgcctcgatcgtctggcgctcgacctcagccatgttggcgaggtggtcgtcgagctccttgcgcatctcctttgcgacgtccgactcgcggtagcgcttggcaaagtcgtcgatcgtcggggggatcttgccctcgttcacagagtcgtccgcgctcgcctcgttcctcacttcgtcgtccgacgaacccctcttccctccccctcctttgtcgtcccacctcgaccgcaccccctcctcctcctcacggacgtcctttgccgacctcgtgaaaacccgcggcgcagcatgggatttcaacccccgtctgcccgatttcctcccggttttccaacgcgaggacgcgcggcggacgtcgtttgggggctcggtcggccggccggaggcgcttgcgggtgagggagggaggaggggcgaggagacgtcgaggaggctgagcgggctcagtctgtcgccggccgccgcgggggcgtttgcgggcaagttgtctgggcctgggatgaagggacggagcgacagcggcagtggcgggtggtacgacccgcagcacggccggccggctcacgctctgctccagcagtggccggcagcagtttcgccagcgcaacgctcaagggccctgtcgccatcttcagcggcggcggcggcgggagggggaagcggaagcaagccccgcagctcaagcacgacgatcgccgacctcctcgcgctcgaccggcatccttcaagcacccgagcatcaaacgcccccttgacaaccggcagcggcggcggcggcgggcgctcgagccgagctgcgctcgagagcgcaggcccctcgatccggaccggcggggaggcgatggcgcttgcggcgcagacggccgtctttgactcgcctggccagccgacgagggcgcttcctttggccggcccttccgctactgacggcggcgacgaggacggagacctcgagatggcgtccgttggccacgacgacgacgacgacgacgacgacgacgacgacgacgacgacagaggcgaccaagagatggcagcggccgcacctcaacgtgtcgagcacttcctctcgcacgcgcccgatgccgtcccgcgcgtgccggcgccgactttcattgcatttccagccggtcggacaccaccaccacccccggcagcagctcccggcccgccaggaggagcgcaaacggcgcggaagcacgggcgctcctcggccggctcgtccctcgccggcggctcgtccggctcgggctcgtcgtcgcgctcgcgctcgccagacgtcgatcgtgcggagccagcggcgaaacggccaaagagcgccggcgacgtcgtcttcggcggcggtgcgcctgccgtccgtctcagggtcaagccgggcgtttctcctgcttttcccagcccgttaccgccgacggcccgagtcaaagccgaggcgcacgacgagccgctcgacgaagaaggggaggacgagctcgaaccggacgccgcgcccgaggacgcgagagaggcggtcaaggtcgaggacgggcgggcggcgaggggccgggcggcggcggccgaagcggaacggacggcggcggcggcagccgaggacgagcgcaaggggccgaagccgctcttgactgccgtttgtcctctcccctgttgagtcctcttgctgcggaaagctgacctagaagacgacgatttctcatctcggtaggagcaaaagcggacgaaccatatcctgagcgagcagaagcggcgaaacgccatccgcaccgggtccgtcctcctgtctcatagcccccgccgtcgcttatctagctctgaccgtgcccgatcgatttccactcgccgtgcagctacgccgagctctcacatttgctcgtctcgtccccttcgctcccttacccgccgttcgacccctctggcccctccccctcgacaatcgccgcccgcccctctagcacgccctccgcttcgacaacaccctccacaacagcagcagcagcagcagcagcagcagcggccaaaagcatgcgcggcggcgcccgcggcggctcaaagtcaaacatgctgagccgcgcggctgggctctgccgctttttggacgaggggaacgctgggctcgaggacgagtgtcggcgagtcgagcagctgcttgttcagggctcggccgcgcggcgttgaatgacaggccgtccgattacagcttgctcgccacctccgcttcttcctcttctccgctctcacgcatcctcgctccgatcctgcctgcctatctcgaaccccttgccttcaccccttcgccagttcgccaggccccgcactgtacagccgccacttcttccaaccccgctcccacttgacgctctgacgacctagagatggggttagctgcggagcggaaggagggaggggacgggaggggacggacggagatctcatgctggagggcgcggtagtcggcctctttcgcttccactgcgagcacaaagcgaacgttcgagtcgagtcgagtcgatcgagctcaagcgtcagtgcgatgggcggcgagaagggagaaagggtcacgtcgcgcgaagggaacacggacagagctcgagcagacgctcgtcttggtcatcgtctgcttggtcgtctgcatggagaacgcgccagagggcgtcgggcgctggaatgggtacgtcggctaccatgctgttgtcttgtgccatatgctgttgtcggggtgagtcgttgttgtagagtggcagggacttgcggtcaaggccaagcgcattttggctggcaagacctccgacgacgacccttcctcaaccactactaccacagtcagcgtgctcgaccagctaaccatggtccgtcccatccgcccgtgctatttcgctaccgactctcgccttggtcggtccaagagcaacgacgctgacacccctcctaccctggcctgccctggcctgcccttgcctgcctgcgcgtcgaccgtctctcctcccctcctcctccttctctcctctccctccaggccgcccagatctccacctcctccgcgaccctcaccccgcgcccctccctcgagcgcatagctcaccactcgcacattcgcggccttggcctttccaccacgaccctcgaaccgctcgcctcggccgaggggatggtcggccagctccaggcgcgcaaggcggcgggcgtcattctcaagatggtcgaggaggggcggatcgcaggaagggcggtgttgatggctggaccggtcgggagcggcaagacagcaattgcgcagggtaagttcccgtgctcggcggcaaacaagacggggcggggctgacccgactttgaaccctctgtgtcctctcgcaaggcatggctcagagcctcgggcccgacgtgccatttacgatgctctctgcctcggaggtcttctcgctctcggtcagtccggggcgctcattccctcttgttgaagacggggcacaacgctctgcttcctttagctgactcgctcgctccccttcactgcgcgcacccctcacctcgccctccctctccctccccccccttcaccttcccccttggtagatgtcgaaaaccgaggccctgacccaagccttccggcgatcaatcggcgtgcgcatcaaggaggagtccgaagtgatcgagggcgaggtcgtcgagatccaggtcgaccggtccctcaccggcgtgagtcgtcctctcgtccttccacgcgcgtgcgcccgttgcgctcgctcgctcttcgcggcccgcttgaagggtgctcgaaacctggcgggtggagagagagcccgcaagcgagcagcggtcttcgtagatggatcccgtctgaccctgcagccagctgacttccccccccccttcccccttgctcgtcggcagagcacaaagaccggcaagctgacgatgaagtcgaccgacatggagacggtctacgacctcggacagaaaatgattgaccaactgacaaaggagaagatcaccgccggcgacgtcgtgacgatcgacaagggtgcgtcgtgcggaccgaccgtttgtggcggacgcgctcgctcgagggtaagcgtcgagagctgacttcatctcccttttgctcttcgacttcgcgctcgcgctcggcagggaccggcaaaatttcgaaggttggccggagttttgcaaaggcccgcgactacgacgcgatggggtcggacgtctgttcccccttcctcctcctcccccttgacccgcctcccattgacacgccttccctcccattcgccctcgcccgaaacagacgaaattcgtccagtgccccgatggcgagctccagaagcggcggtccgtcgtccacacggtctcgctccacgagatcgatgtcatcaactcgcggacgcaaggcttcctcgcccttttcgcgggcgacacgggcgagatcaagacggagttgagagagcagatcaacgggaaggttggcgagtggagggaggagggcaaggctgagattgtgcctggcgtgcgtgtgtcgctcgttcgcccgaccctcaccaacctctagctaaccttcgattctgtggcgccccctccccccgggccctcgtcccccttacctggggaaggggggggggggaagaggttcgcttagcgtcgtccgcccgacaaagcgtcaggagaagaagaggagtgaacgcaccgagcgcacgcagcgcctcgccattctcatccagccgatcgcgcaaactcgtccggtgaaagttgatcgcaatcacctgcagcagcagcttctcggcaagcagcacaagcgacgccgcaaagactgcctcaagcacgcggttgatgtaaacccagtaggtgccggtgggccggacggcggcccgcgtgatggatagcgtgatccacgaggcggtcgcgatgaagaagagctttgtgtagcgcgaaacggccatgacgagctcgacgtacgtcttgagcgactctggcaccttgccttggatccagtagatgatgatggctgccgatgagaggaaaggggggtttgcggtcagcgacgacgggcttggcttgtacataggtggatggacgcactgaagaggtgcgggaggaagtcgacgatgacggtgatcgcgcatccgaggacaaagctgatggtgagaaagatgctcctagagggcgggtggggtgcgtcttgccggtcagccctcatcctgtggggcacacccagcaacgatatagttgagaagaaggagggatgggagggggggggaagacgcaccagacctggacctgcgtcctcgccggatcgtccctgaacgcggccatgacgacaacaaacggcgcaatgagcacagccgcgcccgcgcaggcgacgaccaacgtcctgaaccagcgcgagagccccatcagccagaggtagagcttcctccctcgccgtgcgcgatgcttgcccgtcgtcgtcgtcgcggccgtcgtccctggtgcgtgccgaccgccgcgcgcgatcgactcggccgtctcgccgacgtctgcgccgccagcagcagagggatcgttcgtgtccgacaggtcccagtcgaattcgtcgtccgtctcggtcgcggttccagagtcgccgtcggagctctcccccccgctgctgccgagcgcagggtcgacgggcgtcaggtacgctggccgcggccggtcgtactcgcctcctccttctcctccctcggaggcatcgggtgaaaggcgcttgttcccgccgccgccgccagcaagccgcgagtcgaccgacgagccaacaaacgtgtggccctggtcggacgagccgtttgtgctcgcgctcgcgtcacggccgtgctgctgctgcgaggaggacgggccgggcacgaacggcgtcgacgagggagcggaggatgacgagtggtgggtcggcagcatgaggggtgggctcttggaggcgtttgagcgaggagccgagagcctagacggccagaaaaggagggagggcctagggctgtaaagggctgcgcggcaggcgagcgagggagaggccggcgctcaagcaggaggcggcggcggtccgtggtcccggtcgagtggagggtcgctgatcgaaagtgctgtcgcgtgctttgctgttggcgctcgtgtctcttgagcaaggaggttcgttgagcgtcggagagagaacgagcagcagcagcagcagcagcagaggggtgacggcgggctgatcgactttagcaggctctcaggctggcgatgcatcttgacaggcttcttccggccgggcgcagcgcacgcctctcgcttcctctccatcgctccgcccggccgaccaccgcacgatgtcgcctgccctgtccgagaccgacgacgcagacttcacatccgtgcactgggcgaaacctaagcagcagcacgaccctctgcgacccatcgaggacgaccatacggctgccgctgccgctgcggcctctcctccgggaggctcgtcatccaccaccacgaccaccgccttcgcctccaacgagcacgaggacgccgacggcgagggcgaggccggcccgtcgactggcgctcagcagagctggctcggcgtccggctcgtcgactacaagaaggaggtcgagggcggtaaggaggcctatgtgtcgtacggcctgcggacaaaggtgcgtctcccgttcgagcttcgctcgcttcgacttccctggccttcgcgcttgttgtcctcctgctctctccaatctggttctctcggcagcttggcgtgtactccgagctcagacgcgaggcagtggggctggatgccacccgtccccgcgcgctcagtcgctgacctaactcctcccccctccatacccatgcattccgcccctctcggtccccggcaacccagcgtactgcccctgactcgccggcagccacggctggtgctgctgttgtgcgtggtgcgccggcggagaggccgaggagggccggtgggaggcgcggtagaacgagagggccgagttggtcaggacggtcaggaacgagagcgtcacgagcgtgaagccctgttggcggtcaagcaaaaaaggcgacagcggggtcagcgggtcgagcgcgtgcatccaaaagcagccggggggtggagagggcgaaccatcgtcttccagctgatcgggtcgacaaagccattgacgacgccggcaaaagtctcggccccgacctgggcccggccgacggcgagcgggtcgcgattcatgcagtactcccaggtcgtgcacgcctggtgcctgcatgtcgggcgagacgggggtggggtatcagtgagagaggtctgggttgggtgtgggcgggaggatcgtctcgagaggggaccgacatggctggcacgcgcttcgacggctcgcagtgattcgcgaggtagctcgccgtgcagctcgcaatttcctgaacaatgtctaagctcgtccagccaccgaacgagcaagaaaagcgttagcgagggccctccttttcgacgcagagcgaacgcgcgagggacgtaccaaatgacgcctcctcgaccttgcgctggatgtcggcccggacggtgaggatgaactggacggcgaggtaaaggaggatgaggacaagggcgaggttgaagaagaattggaggtagctgcggcgcgaggggcgggggcggggcagaagaggctggtcagcgatggacgcacacgatggcctcttccccgcctagctgacttcccggcggcgaagacaggaggagcaagcgagcgagaacgcacccgagcaggatgtatggcacctcgccatgcgcgaccctcccgccctgcacaccgccgcccgagccgggcatgtgcaagttgtagtgcgtcgacccgcccgactggcgctggagttgtcggtccgagctggtgttgcggcgccggtgggtcgagcgccggctggttgtacgggcgagggcgaaggaggaaccggagcggcgggagggcggttggcggtcgtcgtcgtcctgcgtcgcggagcggtgggagagagaagcacgagggtcgtcagctccggaccagcaacagtgccagcaggagagaagtacggaccgaaagcgaatgcccagcatcgtcgtcgctcgcgctcgggccctcaaccgacccgtcgccgtcctcatcctcgacgtacgcccccctcgcccggcgcgaccgactcctgccaccgccaccgagggccgcaccgagcctcttgcgaagttcgcgcttgaccgccccgcccgcgagcttccgcggctccttctgcgcaggcgctggttcgtcaggctgggctgccgttgagctcgaagctgttagggctgctgcgcccccgcccccgttgccgtcgtcgtctgcgcccgtcgagccgccatcggtcggctggccgccgccgccgccggcctccatctcgacctcgggtatcccaaaggccgtcaccgggttgaatgcgcccggatcaaagctgaaggccgaggcgggcgggagacggctcccatgctgcgtcgttggccggagcgcgtcgggcgtctggaagaggaaggctgagcccgatggagaggaggacgagaaggagccgtaggttgggccgctctggctcgggaagagggctccggcgggtgatgggcgggagaggaaggcctcggacgcgtaggtcgggtcgtagtgcgggcctgagcacacaagcagggaaggcggtcagctcgagcgggcgatgttgaccgagacacgcgcgcggccggccggcgagcacaaggaggcagcctcagctcgctactacttacgtttcctcgctggcccgtctccatttgggtgttcgtactgccagtccatcgggcctgccgtcgagcgccgcatggtcgattgagcaagctgaggtcgcgtcttcggctccaggctgaagtcgctcgcccatgaaataaattaaaggacaggcccgccctggccttccgcgctgacgttgtgcgggctgaaaagagaagcagcgcgcaaagcactctctcgcccgcacacccacccacttctttccctcccaaccccacccaccccacgccaaaggcaaatcacagcggggcgatcacccctccccctcgccctctggcagccgacgatcggagaccgagaccgatcctcttccccttccctccctccctccgatcacgcgcgtctcccttcaaaacctctcggatcctgaccccacccctcctctcctctcctccgactgacgcagggcaccacaagcaccgcgagcactagacgcgctcgcaccagccagattaggttgaccgagcctcaatcgactggccggctccgctcgagcgagctcgatcgacgcgctggccagaacgaagaggagcggggtcgtggggaggaaagggaggaattgagagacgagaaaaatgaacatacggcctttgaactgttttgggtctcggcttgctctgctcgcttacttgtgggcagacaagagagccgacgggctgtcgctagcgccaaagagtcagatccgtgagagcgggctgaacggaacggacggctagagcggcttctaacaacggaggaaggaagaaagggttcaggcagggcgctgctggccaggagaccgaccaactggtaagcgagccggaggagggtcgtttctgccagactactcgattggcctgctatgcaaccccgatccaaagcgagcggggcagtccccaggaataggctttgggcagagagagagagggtcatgtctgatcgcaggaccttagtcgtcttccccactcggtcggtcggggcgccaggtggccggcccttttagttgtgtcgctctaatacttctcggccatgactgcagcaagacacccaacgagcagcatccggtcagcgacaaaccagggcaaggagagagagagagagaggacaagagggacaaaccaagcgcgacgagtgccgtccagccggtgaacggatggcttcgggcgccctcgcccgtaaacgggtcatactgctcccagacggcgccggtccgcatatactcctgcgtccagccaggccgagtcggagattatggtcagctggtgaacaggggtgacaggacacgtgcgatggggcgcgcaccttgtggatgttgtcgatcaggttgcgccggagcgaggtgtagatctcggtcgcctgggcctggaaggggcctgggacgggcatgtacgtctacgagcgagcgagcgagcgcggatgagcgtcaggaaaaatgcaagtacaggggcaggcgcgggggggaagaggaagacagacgcaccttgtaaagcgccgagaggatcatatagttgaacggcatccacaccggtccccgccagtaattctcgtccttccctgcaagcggatgcgccgcgctcagactccggacaccaaaggccgaccagagccgggccgggtcggcgatcaggtcgaggatcgggccgaggcggggcgaggagggcgggaggagggcggtcaggagcgggaagagcgagatgtagcccgcgtggcaggcgaagatcgagtcgtctgacgtaaggcgaagggaggtccagtcagcgagcgcgcttacgatgaagagcgcaagggggaagacatggacggaccctcttcgtcgaccgtgacgtcgcagtacatctggtcgtcctcgctccaatgcagcgcatcgaggttgagcaggatgttcgcccggttccgccggtactcctcgaggtcgtcctcaaactgctcgccgagatagcccgccaggcgctccatcgccgttgcgaagaagcccatccagcagtgcaggtcgacatggagctcgccgttgctcggcacgctcgcccgcggatagtcgtcgaggcccgacgtcagaacgtgcttcgcggtccggccgcgccagcggtaggcttcgaggcgcgagggcgggcggcgaccccagggcttgagctggcccttctgcgaggtgcggaaccagaggtagtgcctgcggagggcggggtagatggacaggaggtaggaccgggcagcagcgggcgaggagaggtgccgcttgccgtcggtagcggcagcgtcgctgggcgcagagaaggccgtctggggcaggccgagctgggctgagagcaggtcgtcggcctcgagcgcctcgagccggtcaagaaaggccgtcacgcccatgctcagcgtaggcgggttggcgaaggttgggacctggacctggaactcggccgggacctggtccggtcgagggggggggggggtgggagcagggccaaaggggatcacagcaagccagcgtcttgccaccggggaggagttgtcaaggatggtggtggcagaggacgcaggcaacgcacagagtagagcctcgcgacgggtggcgaaggcggcctggcagcgagcgcgctgggagacaatgacgggggccgcgtccgggtcggggtcgtcagccggggagagagcagcgtcgacgagaaggtcggcagactcggccatggcggcccgggcgtgcggcgagcactcggcgtgcgacagtaggcccatgcctcctaggcgagcaggcagcgtcgcgaggccagcgtccgatgtaagacgacgaggtgagccgcggatgaggagcagccgctcgagcagcgcgttgtcgagcgtgagccagggtgagtcaaggtcgtccgttcgaagcgagcgctgaaggtgccggaggttggcctgcaagcattggcggagcagtaagagggcctcctgaggcggcaggtcggcgagccggtcgatggccggcagctggtcggcgatgcgccggtcgaggaaggcagcgcgaacgtcaggagggccgatacaagtcccgaggacctcgaggccgttggcggcaaccgaggtaagcgacgactcctggcatttggcgacgttgagcgacaggccggcgtcgttgccgtcgaggaaggcaatgaccgactcgagcgctccggcctcggtcgagagcacgtagatgtcgtcgaggtaggcgagaacggcatgtgagtcgccgaggtcggcctgaagggcctcgacggtgttgcggatgccgagcgagaacagaagcgggccgagagggtcgccttgacggacgccctggctagactcgagcgcggtgaccgagccgtcggcgtcggagacgaacagcggcgtcggcgtgtcgtacgcccagcgaccagcgcgatagagggccggagcatgctgcgacagggccttggcgagcgaccgacggtcgagcgagttgaaggcgttggcaaagtcgagtgaggtaacgtgggtgaacggcttggggaggttgccatcgagggcccgctcgagcgcgcgcgtgatgggctctgtaccgccgctggagccgacgccgaactggaagggcagcaactgggacggagccgagtagtgacgaacgagggccttggtaaccagccggtacaggagctcgccaaccgcgatcggccggatgccgccgtcggccttgaggagcggcgtgagcctcgacgcgcaaaggagctgctggccaggagcgattccctgggcgacctgccgtgtgaggagcaggacgaaggccgagacgtcggcgttgcccagagcgtggccgaggagcgaggccgtccaaccggaaacgccaggggccgtgtcaggcttgaacgagtcgaagcactgcctgatgaggtcgagcgacggcaaagaagacggagccgcgcctgaccgagggccgaagggcgagaccggaccgacggggtgcttggaggcaagagcggcaatggtggccggcgtgaggtcggcgacggacgagtcctcggcgagcaggcgagcggctcgactgagcttgccgtgctggacggcgatggcaatccgacgaggcagcgatgactccgacggccgagcgaccgagggggacggccagtcgacggcaggaaacgcggcgagatgggctttgccggcggcaggcgagacggacgtcgcgagctccagcgccggagctaggcctaccttgggcagcgcgaggaagtcgaacagccgagcctcggttggttcctcgatgtaggccttagcgagcgagccagcaacgagggcgaatggcttggaccacgcgagagggagcggcttgtggacggtccggcaggctgccagggtggcgaaccggtcgacgagagttacaggaggctcgacctgaggggtgtgtgaggccgaggggacgacaggtcgagcaccgccgaccgaggcacgacgacgagcagcggcgggccgaacgacgagcagcgagccgtccgagctgaccgagctcgtgggtgaggcgacaaatggaccgggcgagccgagcgacgataccgagagggcacgaggacgggccggacgacgagctggtgtggcgacgaccggtggcgagacaggccgaccgtttgaggagctggtcgacgacgacgacgacgacgacagtctcgtgggctcggagatgtgtataagaggcagggggaggagagccggacgcggagctgtgtcgagcgacttctttttgagccgagggtggtcggaggagaagaattgggaggaggaagaggaggggtgcaaagggtgcgcaagggccgagggatctactcggactcgtcgtcggcctcctcgagccactggaagaaagagtacaagcgctcggagatcgtcagcgggatcccccacgaaagcccaacgtcctcgcgtgagacgcaccttgaggaacgacccggcagccttcctcacgcgcttgctcgtctccttgtcggtgtacttcttgctgacgtgcgtcccccagttggtgacgacctcttcgtcgaggacgtcgtcctggtagtaggccatcaggagcttgggaacgtcggcgatgagcgccgggtagtggatcccgaggagacgctcgatgccgccgaggagggccttctggtgcttctccgaggtgacaagctggacggggaggagggggtcgtcagcgcgacgcagaggaaagagaggggggaatcagcgcaccgtcgcaaagagcttcgagtactgcgcgacctccttgacggcattctcggtgtagagccactcggacaggacgagcaccgccttgtgcttcttctcgatcccgagctccttcactttggcgaggacagccttggcatcggcctggcccttctcgccctggacccagaccttgagctggaagtacggcgagtcttcgtcctcgtcctcgtccccctcgccgttcccgtcctggtcgccgaggatgagcgagttcttaagcgtcgcggcgagctcgcgctcgcgcgccgcgacagcctcgggcgacatgtcttcggcccagtcgtcgtcgtcgtctgaccggccgtcgacgtccggaatctcactctcgtcgacctctgcctcctggccatccacctccgcctcccccgcgcccgccgtcgacggcgggggggcctccatcccaaagtcagccggccgcgagatgcccatgatggcctctgcgttggccgccgtcgagttttcggccccgctcttgaggcccttgaccttcttctcgggcggcggcgggttcttgatgatgaacgacgtcagcttgtgccggaggtcgagcggcgtccgtgcgccgcaggctttgcagtcgcgccaggcgtcagacgatttggcgttgatgacaaaaaaggtctctgggttcttgcacgagccgcagaggacgaactgcgcaggcgtgtgaggggggggggcggagaggcgaagccggcagaagctcgaaaacgtcagcctccgcgtcatcccccccctccgctacccgaagtacaacgcgcgacgacctgagcgcaccttgtcaatgaagacgtcgaggacatcccgaagccgcggcgcgtcgtgcacgccattgacaatgtagcgttcgttcttgtcgtcgaccttggactgggcgccgagctcgatcccgaagaactttgtcgggtctggcccgggagggagagaggggcgggggggacgtcagcgggttcaatacgagagggaggaaagcagaaggtgaggcaaggacaaaggccggctgaggagagcaagagagtaagaggaaaagggcagaggaggaacgcacaagccgccggccgggcgagcgccttggcgatctcggccatgttcggaatgaccgtcttgataccgttgccgcggccttcaaccttggtctcgagcacgggcattttgtagcgctgcgaggtgagcggagtgggcgggcgggcagagtcaggcttggctgctgagagggcaaagggcagggaaaggagggaggaccaacgtagaacttgtcctaaggtgcgagagaagcggcggggtcgagcagaagggggcgtcagcccgagagaaatcgcaagtgagccgccacggcatgaacgcccttggctctggtgcgccggcccgagaaggacgtacatcgacgtcgcgccggatgttgacggtaggcatgctgggcgatcaagtgggctgggcaggctggctttagcgctggagaggaagagacgaagtcgggtcagttcgggtgtgagcgagtacaataggtcgatgcttacgagattagaggatggatggatcggccgatgaaaggagagggcgaagagcatagactcggggtgcggcgggcgaagagcggggttgtcagatctaagcagatttcgcttcagtctctccgaggaggagcgagggccaggctcgacagtagggagaggtcggctggtctgggagggatgggttgggctaggatggcgtgcgtgacagaacgagtggcgtgcgtaacgtgggaaggttgacgtgctgcgtttgctcgactcgactcgactcggcgaggcgaggcgaggcggacgtggaccggcagaagggaggggacaggacagatggggaatacactgtgctggcaggacgatgggggacgcaagccatgctcgagctggcgcgacgtaggagatgagcgagagagagagagagagagacggcagacgcacgcgatgcggcaactgcctgcagccaggaatgttccccccctttgtgcgcaccgagcaagcgagacagcagcagaacagtcagcctctcggtccgcacgcacgcgagcctggagggaacgcacgtagaagtcgtcgtcccggacgtcgacgacggcgagcttgctcttggcgtcgacgagcggctcggtccggatcgcctttgcgaggtcctacggggcgaaggcggatatgacgtcagcgtgggggtcctggcaggagaggagagagaggagggagctgacgtcgggcgtgatgaagcgcggagcggggagcatggcgagcaagcggcgggggagcatgcaagaggagagaggagacgagggatcgggcgggccgactgcgcccgagccgggacgagaatgcagatgcacttctcccgagcggcggcttgccctcctcctggtctggctcgcttcgtctcctgcccgagcgcatacagccatcccatcgagccagccaacatgtctaaagtctcctctcccgagctcaaaaaggtgcgtaccctccagttgaacatccaccctactcaatcactcattcaatcacccatctcccgccgagcagttcatggacaagcgcatcgccgtcctcatccaaggcggccgcaaagtgacgggcacgctccgcggcttcgacctcttcctgaacctcgtcgttgatgacgcggtcgatgagagctcgggcggagcgggtgacaaggtcccgtgtggtatggtcgttagtcccctcctcctctttcttttcgaagctttcgctcgctctggcttcagccttctgcgcctcacgtttggctcgattacgaccgagatcgcccccctccttgccgacttcctccgccgctccttgacttctcactcaagccagcaaaagacgagcgagcgagcgagcgcttcgtccgcctcctagctctgcctctatcgcccagccttaggcggacggaaaccctcgcatgcaggcacgcaggcaggcggggggcggttcaagcccaactcccagccgccacgggcgtgcccctggcctggtctggtttggtttgggctgacccagctcagccttagcctggtgtggggcgagtccaggccgtcttggacgagaccgacgacgacgacggaggacctgaagcgggaaggccggaccgcgtgtcgcccgcatccgtcccacccccttcccgccaggcaaggcgagataacctgcctctgatctggctggctggctggatgttcgatcggcttgcaagcaggctggcttgcggtcgggtggctgagtgggtgtgcgcagccggacgatcgggctgagctgttcagtcgatcggctgatgggtcggtcggtcggtcggtcggttggcgggcttgctcgctagttggtcttgctgtggctctagggctcatcgaagagtcggcaggaaggagcgagcagcagcgggatggacgagatgtgactttaacgtgggaaggagtgggtcggggcacgagtccagactagcgcgcgtcgtcgtctatttctcctgcccagtctcttgactgcctcatatcaaccagcacacagactgacacacacacacacacacacactctctctctctcgtcggcgctggcgttccgcaggtcatccgaggcaactctgtaacgtcgatagcgacgctctcggcctgataggtcgcacgtcaggcgtcagtcgcgcgtcgggcgtcccttggctcgtctcgaagtcggacgaggggtcgagagggagcccgaccgggcggtcgcctgatcggaggggggtggggggggtgggccgcgggcaagcaggacatcagttatcttccacgccaagaaaaacgacgacccgatgcagctctctgtccagcccaaactcacatgtcgtcacgagcatgccgatgccgatcagcgtcagccagagcgcattgtccgctgcctggctcttgagcgcgccttgcgcgccctggagctcgacgagcgctgctgcgttcgtcgggtccgcggcgaggaggagggcgatccgaccgaaggagacgaaggttgcagtgagcttgccgaagatgagagtcatgaggctgcgagaaagaaggagggggggggaggtcaaccgtcaggttctccttgagagagggacggcaaagggggcgtgcacggacacttgagcggagccggcggcggctgagagcaggcgggcagacgggcgggcgagcgagcgagcgaggcaaggaaagaatgcaaaaccgtcaatcggcctgcagaagcaacgagggcagggcaggggcaagaggagggcaagcagcccgcgcgaacgacggaacgcacccgacgcgacgagcccggccaacatcagcatccgctcgcctttcgaagaatagcggaagagggctaggagcgcgaccggcttgggcacgtccgttcccttcgcatcatcaccttccttcgcagcctgttgtgacgtgacgtcgtcaacaacggcgagcccggcggggccgccgccgagcccgacgcctttgccgtcaaccgcgcgcgccttgggtggttgaccgccgaaaaagcggcgcttggtgggcgctgctgctgctggaggaggaaccaaggagggcggcgtcgatttctcggagagcgacggagggagtgggtcggaggacgaggagggtgacatcgggtgggttggctcccggcggccggaagggtccgtgtgggtgggagtgagggagggaggaggccgaggtcgccgagaagggccaggaaaggcggcggcggtaacttgggacgtgagctggatcggccggtgacgagggcgctggagagtcccgattggaggtgggcaaggagcgatggaaggagagggacggtggtcagacggaaggaagggataggacgagggctgagagacgacacgcgctctctcgctcgccggccgccggtctcgtcctcgatcgcaggactcttcggtcaaggccccatggccgaggtcgaccgggtcggccgcccgagatcaatcggcacccagccagcgtgctcggatccgaagcgaatcttccccgatgaggcccaagtctggttctggcaatttcgctcggccctccggctgccatcttgcttcgaacgtcacaccctcctaagccaaccaactacgcacaaggcacgcccctcttcaggcccggccgtcttcgtccgctgcgcactcgcacgctatcggccgcttgctgactcgcaccgacatcgattcttcggccatttgctacctctcgtcccttcctcccgcagcactccgcccacaccctacaccctacacccttctagcccaacgcaccccaccctccacccggacacacgccgaccccggccctagctataaggcacaagagcccttcgcccgaagaagatggccttttttcgcaagccagttaacgtcgtcacgctcttgttctgtcctgcctctctgcctgcctgcctacgtgccgcttgcagaccactcgctgactgcgccgccgccgcctccctcccgccagtcataacccgaaatcccccgcctcgcaccaagccctagcgttgctcgaaaaggcctcgcgcttcgacaagctttcgaaccctcggccggctctttttgagctcgaggtgattgagccgccgctcgggatgacgggcacgcagcgggcgacggtcctgcgggcgctgatgcggaaggaggatggcgagcgcgaggcgaggcgggccgagagggagagggagagggcaaaggctgaagcggcaggtggtggtgaaggagagggtgaaaggagtaaggtgcttgaggaggtggcgaaggacgacgtcgactggacgtgcgtttccctctttccctttcgctacgtggtcgcttgctgcacacccactcgaaaggctgactttcgcattcttgcctcctccctcccctgtctcttatacacgagcccgtctcgagcgcggcgggcggcgggcggcggggggaacaggtcagcgccggcagtctcgtttttctgcccaccccgacgacggcccacgacagcacggacagaactgaccctcttgacactcttgctgctctcaggatcgatggtggttatcgacaggcaggaggaggcggccgacagggcgaagcaggcggccgcgcgcgcaggcgcagcagtccagcgacctgcgcctcatgacccgcgcctccacctttgctagccggccaccatcagattggatcgccttcagactagtttgggcaacctctcctggattgtaggaacccagcggtaccggtctcgcagcaattcaatgagatctggtatgcaatgtttcgacccgcgcagggggctcccgcccccgggcccccctcgggcccttttccggccgtccctgtgaccggatcgccggcactttagtttcctgcgtctccgctggtgctggccgaccagtctggcacagtcctgtgttgatcgcaagattcggtaaaagcgcatgtacccatctcttgcctgggggcgactcgggggcgacatgcatctactgcaggttgacaaacaggccaccgtcgacgagcaggctgcttccggtcgagtagcgcgacagatccgacgcaaagaagacggcggcgccggcaatgtcgtccgctggcgaggccggacgaaatgagtcagtgctcccgatgcagagagatcgccttaacggcaatactcacggacgccaagtcggccgagacacgtccgggcgctcatggcagcatttttggccgggtcagcgaggtcctccgtgttgatcgcggtcgcgatggtgcctgcggtaggaaatgaggccgtttcagccacctgagcgcagggcgagcggaggagggacgaaccgggcaggatgctgttgcagcggatgcctttcggcccgagtgcgatggcgcacgactccatcagacctgcagagccgcaaacaagcgcgagccagtcagtgaagtcgctcaacagaaaggcgcgagcgaagaagggcccactcttaatgcccgccttggtcggcgtgtagtgcgtctgctcgccgccgccgacgagggccgagatggacgagatggcgatgatgctgccgcccggcgggctctggctggccatctggttggcgacctgctggacgacatagaacgtgccgtctgatcgttcatcgaggcagagctaacgtcagcaagtgtcgggtcgccgagagggccgcggggagagctcggagagactcccgtacccatgttgacggcctgcgtcttcttgtagacgctcagcggcatgtcgaggaaggactggttgcagaagaaagtcgccgtcagccagcaggtcaaggagagctcggtagctggctaggactgacgtggaaggggcagatgcctgcgttcgagatgagcacgtctatccgaagcgagagggtcagggcagccttgacgatggctgcggccgtctcgggctcggcaatgtccccggcaacagcgaccgacctgcgaccgagcgacctgatctcgctcgccatctcggcaacctcgccgttcgacagctcatcgccaaagtgatggaggacgacatcggcgccgttggccgcgcactggagggcgcaggcccggccgatgccgcgcgacgagccggtgacgacgaccgtcttgccggcgagaaggttgctcgtagggagctcagggatggatgagctggacattgtactgtagtgaggggctaaggcaggtgagagagcgttggcaggcaggtcgagcagctcggtagcgagctcgcccgggctgttgaccggcgctcggcggaatactcgggccgagggtccctcgtcgcccctcctcctcctgctcgaccagcacccgacgaagcgacctacaacagcccactcacccccaatccagcccgtcctctcctcaacaaagaggagaaacagaactgactctcgactcacccagaagccagccaggcacacgctcgctcggcagcctcaggccagtcgtccaccggcattgcctcattctacctcgattcgttcccggcgcctcctctggagcaaacaccagagccgtcggtcctcgtctcgacacgggttggtttggcagtcagcacgccttacccgcctgctcgttcgccgccaggagacgtgagggcgcacctgcgtcgggtagtcgtacgcctcggtcgcatagactgccgtcgccgccgccatcttctggtggacggccttgagggcgtcgacgcgggcctcaaggtccttgtactcctttgggagctcggtcagctcgtctggcgcgacttggccgaagcgctcactgtcgcggatggacgtccgacaagggtgtcagctgctgctgctgggttgtatgcgctcgacccagcgcccgggcgagcaggacggcgccaggaggggagcaggacaggagagagggggggaagggactgaccgaccggcctggaccgagtttcggagcgtgctcgcgatcccgaggtcgcgcacggccggggccgcagggagcggcgggaggttggccgtcagaccttgaagcttggcgaacatgcttgcttggctgtgcgggtgaggagggaaggaggggaggaggttgagtgagagagaggagatggcaagcgagcggcgcaagggggacggcagggccgtcggaggcaaaagtcggaggcggatcgcgaggggggcggacctcgggtgcggcctaacaagcacaaccccatcctccgtccttgccgccgtcctggaagagcgtctgtaagaccggcaagactgaatggccgcgttgtcgtgtcgtcccgagccatcaatcggttggccacaagtgagaaagcgacgaatagcgacgcccggcttgttgcccctccttcagccttaccgtcgtcccccttgatctcgattgacgacgacaagtcgacctctcggatgcgagcctttcgatcaaagcatcctccttggagcttctactcatcgcgagcgagcgaacgagctccgtttagacggcgcagaggcactcgcaaggagaggccgagggcgtgtcctcctcctgcgcgcagcaagagatgtgtggccgttgaccgagctttcagcgagggcgagagaggggctcaatcatctgatcccgatcagcactttgctcatcagacgcgatatctccaagggagacgggaagttgacaactcttgctcatgtgcttccgccgcgctggtcgagctctagtgcgacggcctgcaggcaggcaggcaggcaggcagctgagcgcagagccggttcgctcggaacggctcctccttcgacgcttttttccgcctgccgaccgagagagcttcgacgagaaaccagactgccttctctgtgcgttttcttacgagccgagggagagggcgacgatggagttgttcgagtgatgaagaaaagagacgtcagcatggcccgtcgtcgctgctgcgggctgaggcgattccaaagccgcccttggccgcctcccttgcccgccccgatctcgcctcgccttctcctcctcctctatcacctcttcgatctacaccagcatgttctccgcactcaacaaggccacttcgggctccgtccggcgctcgttcgccacctcatcgcctaagcagagtcagccctcctcctcctccttctctttcgtcatcgcatcaagccagccagccggctgaccgaatcgactctcccgaccgacctaacctacctacctacctgcagacggcggcctctcgaccccgctcctcgcagcgaccgccctcgccgccggcctcgcaggctactactacctcaacgcgacgacgggcgtcccggcctcgatccccgaggcaaaggcgctcgcaaaggacgcggtcgagacgcacgaccggccggtcgcgctcaagaagtgcgtcgtcgtcgtccctgcctcctcctcttgctgcctcgcctcgcctcggtttccgactccgggttggagctcgtccttggccttcgtgcggtggtcgctgacatcgagcgggctctcccgtcctcgctggcaggtccgagtttgtgcccttcaccctcaccaacggtccgtccttttcccccttcctcccccctccgccctcaatcgcctcatcctaaccaccccctccccccaaaaaaagtgtccgactacaaccacaacacgaaaaagtacacgtttgccttcccggacaagacggccgtctcgggcgggggcatcacccacttgctcggggaggaggagaaccgttcatgggttcgcttcagtcatctcgaagtgggtaagacttggaaaaagagaggagctcgcgccggcatctcgcgctagcatgaacggccgatcggagcaaagggccgagcctcttcaagtgcagtctctcgaagagacctgcctgccaattgcgggcgaaaagatagaaaaaacccgctcgcactcgcgcaagagaggaggaaaacacgcaccggtcgtcgcggcggtagtcgtcgcggcggtcgtagccgcggtcgtcgcgccggccgccgtacgggtcagcgtcacgcgggggcggcgggtagccacctcctcctccgccgtagccgcctcctccgccgccgcgggccgagtcgatgacgacgacgacgggggcgcccctgagagacgaaggtcggtcacgggtcggtcagggcgcaatcgtcggcagaaaacaatgcagcagagacggaccggatttggaggccctcgaggcgcttggcagcatcctcagcgtcggggaccgaggggtactcgatgatgctggggtgaggcaggaatcagttggttagcggccgcgctggcggaaggagttaagacagaggacgcacccctggcccgggacgtcgcggtcgaggtcggcgtagctgacgggtccgccctcgcgaccaaagtccttgaggtcctggttggtcggacgatcgcaaggagggccgagaagggaagaggagggcgacgagcggatggccgagggacggaaggcgtcagattccagcgttcgggttggccggccaaaggaaagggaggggcgatccgcgacgaagaggtcctccgccggcgtcagatgcaagatatgcggggccgctcaaggaccgcaagaagggcacgtcgtccgacgctttgccgtcctgcgcgagccgcgccgctccggggagaccgagacccgcctgagcgtcgccgtcgtcgtctggggcagcgaccatcgccgccgacccgtcaatcacgaaaggacgctccacacgtccgtccgtccaaggaggtcgtcaggaagcgcgtcctctcggcgcagccgccgtctgcgaccggatggtcaccatgcgcgcgcaaccgcgaggggaatgatgggaaggaggtgccaggtcgagagaagctaaggccgtacctgccacgagacgtcgcgggggagatcctggatgaggagccggccacggccctcacgagggggcgcccggctgccgcctcctccgccaccaaaggcgggcgggccgccaaagccgcggggagcgccgtacgggtcgtcgcgccgctggccgcgcgtgtcacgagcgtagtcgagcgtgatggcctcgccgagcaggtcacggccagagagggtggcaacagcctcctcggcgtcctgcagagggaaaggtgaaggaggtcagcttgctgagtaggaggaggcaagcgggcgggcaagcgggcgggcgaaaaccacggccaggctaggctgccttcgagcatccgtcgtcgcccatccagcgctggtcgaggtcgtgacagcatggtcccgacccgaccggcagcctgctacgccacctgaccatccgcggtcaaagtccaggaggaagagaagggggcacgcacgcgaggcgactcaaactcgacgaagccgaagccctgcatgacgcggatgtcgatgagcgggccggccttggcaaagaagtcctcgacgtcgcgacgggtggcgtcgcgcgagaggcggccgacgtagaggcgctttccgttgatagacatgatgggctggattgggaaaaatgggatgagggtgggctggaaggaggaggcaggcaggcaggcggccatcgcgcgttctcgcccagagacgggtttcaactatcgactatcgattcatcaaaggtctcgcccaacccagcaagtctcgcccggcgcggtatgcatgagggcgcagcagccgagcgacctgcggggcggaaaacgcgcgcactgccctccctaagctaagctagccgatcatcctctgatcggatgaccgccaattctcttgatctggggtcgcatcgtcgagggatttccagtggtaccggtctcgctgctgtcggacgagtacttgctccaaccccccgcgggcccagcagcggcggggagcgacgagcgtgcagagcaatccagcacaggcagcctcgcccctggcgcctgcgcattccccgcgaggaggagatcaaagcatgaacaggaaacgcaccaggcctctcccccggcgccttcgcaaacccgccgatcggcgactggcagcggaggaggaacgcctggttcgcgggcttgtcgatcaggtgcgaggcgttgaggagctttattggcggcaagggaggaggtaggtggggttagcagggaagcgagggagcgaggtgaggcggggggagggtggctcgagcagatgaggagagaggatcggcgaagattctcagtgagcgagggctggacgtccgtccgtctgaacaagaggagaacgcccgggcgagcgagcggccggcgtctcgaggtgaaatcaggcgagacggaaggcccatcgcggtcgtgtcaaaagcgcgcgcccgctcaagataagggggcagagaaaaccggacagaaggaggacgagaaagcaaacgcacctcgagcgccccgccacaccaaaagctatagcacgcatcgcccttcttgcccggccggccctggaagccgccgcccctgacgccagccgcctcctcctcttcctcctccttcaacagcgaggacgaggacggcggaggcggtagaagggaggggaggacgagcgagatttgccggtggagaagccacgagatggcccggttgtcttgatccgctttggccttggctttggaagcggtcgtcggccgctggacggaagggggcctgttgtcgggcttggtctggctggcagagggggacggcgaagagtcgtccgtgtttgtcgtcgtcgtcgccatcgcgccaccccagccgcccgtgctatcgcttacctccctcgccccccctttctcccccacctcctgcgcaagcgccagcgcagacccaaacagccccctagcgacgaccgcgcagaaggtcgtcccgccttgggcttcttggccggggcgttggccgaagccgccttcgtaggacttgattggcgcgggagagagggggggggggacacgcagagagaggtgggaaggagcggccgaccagaggagatgaagcgaaggcgaggcgacgcaacgcgggtaaggcggtgtggagtagcgcgaaccgaggcgggcgaggcgacgcatcacaggaaagggcagggcaaggcgggcgaggcaaggccaggttgatgcgcaaggtgtcggacgggaagcggaacggacaaacgggatgggcgagaacgcggccaggcgacagacgagagcgaaggcgggccgacgagaagcgcacaaagaccggatgggtgggacgacaggcatgcgaaggacgcaaagcagacaaaagaagcaaaagcgtcagctattgaccaatccttctttccaaaaacccacggcgcccgcctacgcgaccgaccgaccgaccggtgccactcaagggactcgtgaggaggccgacgtcgaccgacgtacctggcacccgttcacccactcctctgcccccttgacgtcgacccctcgccaatcgctaaggagcgagcagacgatcgcggcgcagagcgacatgcgaacgtcggtttctgcgttgtaggcgagcgggaggggggagaacctatgtgtgccgcgttcgcatgccaaggagagagggccaaggggagaggggaggagggtgtttagcagttgagggagtgagaagcgaagggagtgggtcgggcgtgagagcgagcgagcggaaggaaagacgggaggggaggccaggctcgagcacccaaattgtccgccagcaagcccctgagactccacagtcgacttcgcgctcatcaagcgccttttcaaacccgcgaaaaggcggtcgattcgcgcacgcgcgcgagcgaacaggcaggggcgagcgacaagagactcgggcgagaacgaggtgtgcgcgatccatccgtccgtccgtccgtccagggagccttcgcaaccgcctgccctccccgcgacaggagacggctcgagcgtccgaccgccagccaggccgcgcacgacccttctcgccctccctctcagtaacccccacgagctcactcacacgggtgggagggcgagacgaggacgagggcgagcgctcgggggaaggggggaaatgaagagaggttaggttgcgcgcgagtcgcgtcgtcagacgacgagtcttccatgacgacccctctctcttcagttggacacgcgtgagacgcgcaggtcgagctgaccctctccctctctcgcaaagcctcgacatgcgtctgacgcgatgcgcaaacgcgtctcgagccaatcgagcgtaggcggacgcgcgtgcgagcgacgagttgaaagtgacggaagagagagagacgcgacgcggacgggacaagactgggactgacggacggccgagccgatccatggaaagtagtggaagacgacaggagggagcgtcgggtcctttggccagaactgagcgagcgaagggttgcgtcagcttctctcgcaatgagaggagggaggggaaggggaggggtcatacgagctggtagctgacgttaagggcgacggcgaagaggggcgcgccgaagaggacgagcgggaggaggacgggccagtttgggaggagagcgaccgtctgagcgaggacagtcgcgaggagcgacgctggaggagggggcgacatgggtgaaagagggtcggggggtcgtcgtcggctgctaaagggcgaatggcgaagtgggccgatagacgaccgcaggggaagcatcgacagctcgacccatcttcctatttattcgataagatcctccatttgtgctctagatgcccctgaccctcttggcctggcctggcctggcttgcctttgcacgcccctctctgggttgaaagggtcctcccactactccctgccctgtccctttccctggccctcccttccccccttgcggagtttggatcttgtcgtcggtgttgacgggcgcgcggctccttccccctttcgactcgaacgcgtcccctcggtcaacctccttgtccatccagtcgagccaccagcctactctctcgccttccaagctcacactacacctctcccagctagctcgctcgatcgctcgctccgagcagcagcccaccacacccatcccattttgctgaggatgcccgaccctcctccgcccaccggtcgctcaacaaccgccgccgccgctgccgccccggccgcgctcgacgacctgaccgaagagcaagtgttcaacaccaagaagcgacgctaccatcttgccgaggatgtcagtctcccctcctctgctctccttcctgagtgttcgcaaggtctgacgagtggatggatgcacacgacagccgatcgagagctcgcttggagggccgtcgcagcgcgtgctttcgcatgagctctcgcagcagccggtcgggctaccccctctcctttcaatagcaacagcagcagggtcgtcgtcaacttcaggaggaggaggaggaggaccattcgtcgaccttctcgccgccgccggcagcagcagcgttgaggaccgagaagcccccgttccgacgagcggccgcgtcacctcaatgacggccgaggggccggcgggaccggtgatgatgatggcccggcttcccatccggccaaaggctggcttgtcgacgacgacggcggcggggaagaagagtcgacgtgcgttgtcccttccttcccttcttctgcttctgctactggcctattcgcgagcgaggaggctcgaggagcggcttgcgcgcgctgttcttgacgaggcgaggcgtggcgagcgagcgagctcgacctctcttcctcggggtccactgcgaaggcgacggcggcggctagcgggcaagggactgtggattcgacgagtttcgctcgttaacgccccgtccgtctgcctgcgcccgcccgagcgcgcactggggcgctcgctgcttgcctccccctcgcggcgctgacggagttgtgactgactccaatcttgtccgctccgctttcaccttccttctcttcccttcccccccccgggtatgaacacagtcgactttaacccccagcccctcccgaaatcgacatcgacgacgacggcggcagcagcagcagcagccggcacaaagcaacccccggtgccgccgccgaccgcaggcgcgggccatggcgaagggggggtagagcggtgagagggggtgggtgagatttggggacaacaggtaaaggaagggacaagggtcgacgtgaaagggaagggaaggaaaggaacgcagggaggaggcgaccgagcgaggtcggtcgagatcgatccgggtccttccagcttggccagcacccggcccaccatggtggacggcaagccgcggagctcgctcaccgctcgccacgcaacgcaacgattcgacccgtgagaggccgtatgacacggcgcggcgacctcccgaccaacctccggctctccgaatcgagcccgccgcccagagtccgacaacgcggcctagccatgcacgcttgctccaccaggtcgaggtcccatctggggcgagcgtgtcttcgagcctagtcgagccagctgagaacggccgtctgagcgccggttggccgtctcttgggcatcgcgccgttcgaagctcctcgaggccgccaggacgggccgcctactgagccctttggaggcggcagaagacatctcccctttattcccctcctgtatccgatctctcgcgcgagactcacacgaaggtcgggccgtcgtttgctgctagtggtcgttgctgcttgacagtcaagacggcccgacgcgctgttggcggcgaagaggggcggagtttgaattctcggtcgcagcagcagcaacgcgtcggcgtcggccggggttcaacctgtcgttcgaccgtcagcccagcatcaaaacaggaccatgccgcccgtcatcgactttgtcatcggtcggtctctctcgatgcgagtgctagctgttcgtcgggactgacgaccaacggctcatcaccgcgcagagcacctcgaggccgacgagccctcgcccgacggctcgagtgccgctcccgcgaaccctgtgcccgagtgggtctcgctcgagtacgcccacatgcttgaggtgtcgccctcgtcctccacagtgcactttacgtccctttcgccgggctcgctcgcctcgttccagtctgcgctcgacgcgccgcgcccggccgaacgcgcactcgcaccaggacacggcgcgaaggccgcgtgccacacgtccggcatccttgccctcctcgcttcgaagaacatcccgctcgaacgctgctgtctccttgacccaaaggcaacctcgccgattgcgccgtccgacagcaaggcgttcgacgtcttcctcttcgggggcatcctaggcgacgacccgcccttggaccggacgcggatcctcaggcgcgaggggttcccgtcgcggcatttagggccagtccagatgacgacggatacggcgctggcggtgacgaagcgggtggtcatcgatggcagtatgtccctcctggtctgctctccgttgttgggcgcacaccgctcgcagcgccttaaacctctccctatagccttctgacaccctcctgcccgcccgccagtcccgctcgacgccctccccttcatcaatcacccgaccatttctttttcttcgaaagacgccgtcgagatgcccttccgctacctgacgcaatccgcagccgaccggtcggccgccgagcggcagggtgggatggagggtgacgagggcgagccgctgatgccgaggggaatgagggagctgctgaggagggatctcgacaggggctgggagtttgacaacgagtgagatgcggatgcgctatattcgagagtgcccttttgggccgacaggcacacgtgggaaggtcggagtccagcctctcactcaggacgacgactttccaagtcaaggggtaccagacctggatttcccaagttgagcgagatcttgttggatcaagctcaaaccttgcccactggaagcagatgacggcgccggttccaaatctgccgcctaaccgaggggtcaatcaggcggttcgggtggaatcgaccgggggaggatgggtgacgcctgcggcggcgggcccgcggctccgacagtagcgagatcggtaccgctgggaagtcctcgacgatgcgaccccagatcaagtgaattggcagtcatccgatcagagggtgatcggctagcttagggaggggagtgctgggctgcggcgcccgcgcgcaggtacaacggcaacaggggcgaagtcgcgagatcaagagaacacggagcgggcgggcgggcaaggcgtggcaagaagccaagagagcgcaaaccctcgcggcgggctctttactcgtcggcctcgtcgacgagcttctcgtccttcttgagcgtgacgcggtactcgacctcgttgtcgcagccgctgttgaggcgttttgcaatggcaggggcaaggagcgaagcgcaagtgagaggtgcaggctgtcagcgtctgagtcgagaggagggagcaaggcaagagggacggggaggacgtacgtccgggggacgaagtcgagatagacgaggccggtgaagctgggcgcacgggaagggagcgaatggggtgtcagtcaccaggcccggcagggatcgacgcaaagccaagaacgctcgggagggacgacgcactcggacgtccagtcgccgttcgtgtcgcggtagtagtgcggcttctcagccttgctcttgacgtctctcagctcgagcgtcgtgtgggtaagaacattgcccttcgtcttccactcgaagctgcggatgggcatattggagggcatcggcaggggcgcaaagggggcgaaagaatcgtcagcgcacggcccacgtcgcgctccttcgcaagcgaggtggaagaaaggttggaacgcacgtgtagaccttgtccttggtgacgaggaagggcttggtgcagtgcacgccgctggagggacatgggccgtggagggaggggtcagctgacttgtcgaggcaggaagatggtccgcagcagcaccaaaaaggcgagaggacggacccgtcactgtcgagacactccttgtctgtcacagcacgagagaggaggacgatgatcagccagtcgctcccaagcaagcgaacccccaacgtgcatcatccggacgagggaggggacggactgcagaagtcgaggaccttgaagaggaggctgacgctggccgagcatgtgcgtgccgactgaggagggccgagtggccggcggtggacggagggaggatggccgtccgcgtgccttgctggcggaagggattgcagagcctcggcggggtcggccgggcatgctgatgctgagggtgggctgtcatttctgacgagctggtgaggtcgagggtggaaggcaaaggagggacggacgaaacccagagcggaagacgtacaccggacgccgactcccggagccggcagtccgggcccgaattccggccgctgcttccggcctacccagcctgggtttctgtcacccattcgagggtcaactcgaatctgccctctcggccagccccgggcctctccctctccttctcggccctcagcctcttgacccgccggaccagccattatgccgctcgacgcacatgcccacctgacccgtcaaggctggaagggcaaaggccatgccgtcaaagaaggccacctctcgcgcccgctcgccgtccgggtcaagaacaatctcggcggcgtcggcaaggagcgagacgaggcgttcccttgtgcgtcctcctccctcgacccgccagagtcgctgaggcccctcactgccagcgtttttgatcgcacgcaagcggagaaggctgacgttggaccctccttctgctcgaccgacagtctgggaccacgtcttttcctcggtcgcgtcctccatcatcatcccgaccgcgtccaacacgtctgcctccggctccgacgacgacgacgacgacgagtcctcgtcctcctctgcctctgcagcgccgaaaggcagcctcttccggacaacaaccggcatcatctcgccctatgcagccgccaacctgcctctgacgtctctagtcgcctcatcgagcaccgcgccggcgccggctccagcgtcggccctcaacctcggcgcgctcgcctcggctcggcgcgaggcggcgaaacgcgggctgtatgcgcagtttgcaaagggacaggtgattaagccgaatgcggaggagggggttgtggtgattgggagcgatgggcgggaggtgagcaggagcagcaggaaggggaaagagagggaacacggtgcgtccccccccccggcctgccctcgtttccaacgcccagcgcctctgccaccccaccaacagacacacccgaccctgccatcccaaaccctatcgaccatcccctccacgcccgcgccctcgcgtcgcctcccctctcctcctcgcacgagatatcagaggcgtgcgtgcgcgtgcgcaccttgaagaccagccacaacgagccgagcatcgcgctcgcgagcaaggggaagagccaggcgtcggcaaaggtgatgcgctcgatcggcgggtcgtcatcgtcgtcgtcatcgtcgtcgtcgtcgtcgtcggaggcttcgtcggcgtcatcgtctgctgcggcgtcgagttcgtcgtcgtcgccgtccgtctcgtcagagaaggagagggaggcgtcgatagcagtgtcggaagaggaagaggtggaggaggacgaggccttccgggccgccgcccgccgcctttccccgcgccgaaccaaccgcttcgtccttttcgacacctgtcctttgccgaaagacgcacgcagcaaaaaatcaggtcagcactgggagcttgggaatcgggcaacgcccggaggatgggagtgaaggagaaagagcgatggagggaggagggaagggtagacgggaagacggacgcggagcgaggagaacgagccgatcacgattctttttcgattccgagcggccaaaagcggggggggggacattcagctttgcttgcttgtgcgatgaaaatataaggagcgcggaggagacgaacgggacgatagcgaggatgacagtcaggctataggcttggagcaggccgcggtcgagcatcctgacggggcgaagggagaggaaggaggaggttgtttgagaggaacccggacgcgcgtcgggcctggagaggcgaaaggaggacgcgtcggccggatcgaattcgatactctctgcgaccactcctgctccttgcttggcctgctcgaagtcaagcgaagcgagggcggatgctcgtcatgctgagatggatttgtaatgcgacaacttgtgaggaatcaagagtgccgagccggaccggcgttcacttctcgggtcgtcccctccgcccggccggccgccgacgccggctccgaaggtcgttgcggcgtctgtttcgctcgatcgcatttctcttcaatccccttcgaaagcacagccctcgctcgagcctcgccttcattcggactctcactgttacccaagcctacacctgcttcatcgcctgaagaccgcttctcgaatctccgccgccgctcttcgcacaggccgtgatcgcctctcgctcggctctccttgccggaccgtccttcccttccttgcctctcctttcccaccgacgaccagcaagcatgccgtccctctttcgcccgcttgcctccctcggccttgcagctctctcagcaatcgttctcgctccgccgcacgccgtctgcgcaacaaacgtgttcgaggcaagggccgaacgctacgacccgacgaaccggacgctgcagtttgtacgtttgccttcttcctccgctcgctggcttgtctgtctctcttgggaggaggaagggagggagggagaaggaaatgggttggtggaggcggttggagtgaggcggggtgtgagcgagggaaggcggcgtcgagagaggaggggcaggtcgatgatgatctgtccctcttcggtcggaggcgacggcaaagtggtcgaacgaagccggtgccggcccggcccagcagcaactgtgccctccccctactcccaacctttcctccctctttcctcccttcttcttcccacctggcaccccgtctgaccccgctccttacacgatgcgattaaccgactaacaaactctgtcaacatccccccttttcgctcgctcgctggctcgctcggcctgtggtatcccttcaggagtacccgcaagatgacatgtcgaaccccttgcgatacatcccaaccctctcgatcgcggttgtcgcaacggttgtacgtccctgctcttctgcgccccttgaacgctctcggcagagaataggggacgcaattgagctgactcggccgtccctgcttccgatcttcgcccccccccccccccccccccagctcgaccgcccagttcctccgggtctgctggctcttggccgccggcaccctttccagcgctggatgggtcgaggggaggtcaccacgacgagtgggagtgttgaaggaagagcgtcgtggtagttttgcgggagggtcgccggcgccggcgcgctgcagcgcccgcccgcgcggcggcgccggaagtcagggttacgcttcatcgaacgtaacacgctttacctccctccgtaacatcactctcttgcccttacggcttcctctctcatagcaattttcaaggcgcaaggcgcaagtccccatgtatcttaagcgttcacccgactgccttgtcccctgcaaggccgtgtcgttcaacagagtcaacggcagctgccgcgagcgctgtttacaccagatgtgacgacgaccctcgtgtcagtttcggttttgacacgacgacaaggggcgcgctgcgtcctgacaagcaacggcgcgacgatcgagaaggacggacgcaccatcatgacggcctcgccccgcggcccctcgatcctgctcgacgcaaaggccgtcccggccccctacaccttgtcttcgcggccgttgccgcgcctctcgagacatggcattgcaggctgaatcatctcagcctgggtgctgtgagtaaaatggcgacgggcgctgcaaaggacgtgcacttgacgagtacgacggcctgcggaggtgtctgcgaggcgtgtcagctcggcacgctgcatcggtcgcccttcccgagctccgaccgcaagtccaaggacccactcgagctgtacacagcgacgtagttgggcccgtcaggcctgagacgaggtcagggaagcggtacatcgtcaccttcatcgacgactacagccggaaggcgtggacgtacctcgtacgcgagaagtcagagacgtttgaggcgttcaaggcgtttcagacatcggcagagaagcaatctggacgatcggtcaaggcactgcagtcagacaacggcggcgagtacacgagcacggcgttccagacgtacttgaaggagaccggcatccagcgacgcttgacggtcccgtactcgccgcagtcgaatggcgtggccgagcgattcaatcggacgctgatggaagccgcacgctgcatgctgaaggcgtcagccctgcccaacagtacatggggcgaggcggtgatgaacgtgacgaacgtcttggctagggtaccgcatcgagcccttgggggcaagtcgcctcgcgaaagatggtttggccagacaccatcggtcggccacctccggccgttcggatgcgtaacctatgcatgagtcccgccggagaagcggacgaagctggacgacgtcagctgacggtgcctcctcctcgggtacgcgacggacgcacttgcctggcgcctatacaatccggcggttcggacggtcttcctatcacgtgacgtggtgttcgacgaggccatgccggcgtcgagagggggataagatcgagctgctgcagagggacaagctgcggaggcaagagagggggacctgagcgtcagcgaaggtcctcgtgcggacgcagctcgacccacgatcgacgtcgacctcggcccgcccgcagagcggcaaaggctccgcccgagtctcgagcaccctggacgcgccgcaaaggagccagccggcgcaggcggcgatgggcaaagttgtaggggggtggcgaagcccccccggaaacatcgcccatgagccgccgaggacggccagccgagcgacaacgaggcggccggccgaggcggtgacgaagcagacgacgcaccggacggaggccaccacgacatcgtcctggagcctgctgtgagagcggagcagccgtcagtcgagtctgcggaccagacgacaggcaaggagaccgacgcacgacggccggagacgggtggcgtggtcgacgctgcccgggtgctccctggagcctggggtgacgcccgtgcgggcgaaggggtgcctgcgggcactcagaagggccattcagtcttcatctcggaggataagacggagagtgctgaggatagtgaggtcgagagccttggggggttcccacgtgcctggcccgcagcacgccggcgcgggcgagatggcctccgagtcctccgcctctctatcagctcccccttagtcgacgaccgacgcctaaaggctcaacgacgacctatacccttccgccaggtacgataggcccactctcgctctcttgagggcgcaagctgaccgtcgctcgtctcccttgtcagccctccctccctccgacccaggtccatctcatacgcccagctcccatctcggcccatccacccacctaccctcctcgcctcatgacctcctcagacgcggcatctggcccggcatatctccgcacgctgccggccgtccgagtgcgctgtgccgaagtctatgccctcgctcaggccggcgagctcacctactttgatctgcacgaggacaagctgccggccgtcgtcgactactgcgcccgtatcatcgaggtcggtcggtcgatggctgcctcgatcgctttcggcactggctgacaacctcatgctatcctgcctgcttgcagcgcgactacgacaccgattacgcttcggtgagcggccggctttgacgacctgcccatcccgtctgcctcggctcgagctgaccagccgcccctcactcggcagatcccgcctcactcacgctggcggcactttacgctgccctctctcaagccggccgagtcgctgctcgatcccttgctggcctcgtttgcagcagccggcgtcggcccgctcgagacggccaagcggctgatcgacctgtttgtcgtctcggtcctgctcgacgccggcgccggcgaccgctgggcgttcacgagcaggagcggcgagcgtgtcggccgaagcgagggcttggccgtcggtagtctcgagttctttgagcagggcggattctcgggcgtcgcaggcaagccgctcgaggtcaaccgtcagtgcccttgatgcctttgggccgctcgctcctgccggctgacgacgacagcccctcactcaccctccgcagtggccggtctgcggaagctgacggtcgaccgagtcggcaaggccctccaggtatcggaggccaatccgatggccgggctcgaaggccgggctcagctactgctcaacctcggcgacgcacttgcgcaggcacccgagatctttggcgagggcgagacagcccggccaggcaacatgctcggtgggtgggcagcggtccttgttccgaccttcttccctttccggccctgctgacatccttgcgccttgccgcccgaacagacttcctcgcccgcaagcccggctttgacggcgcgatccacatcgccgacctctggccggtcgtcatggacggctttggccctgtctggccggcaacgcggacccagctcgagggcgtctcgctcggtgacgcctgggtctgtgaggccctcggcaagagccagggcgacaagcggacggaagagagcgccatgtcagtcggtcgggcgctaagctgaagcggccggatgcagacctaagcctgacccgcgcccgccctccccggcccccagcgtcccgttccacaagctgtcgcagtggctgacgtactcgctcctcgagccaatcgacaccttcctccactggacgatcgccggccggaccgaccagacgggcctgccagagtaccgcaatggcggcctcctgctcgacctcggcttcctcacgctcaggactgaggcctttgccggcgacgactgggagacgagctcccggccgggcgtcattccaagggtcgagcccggtcaccaggccgtcatcgagtggcgggcggtgacggtcattgcgctgtgcgtcgaccgaccatggccgcctcgaccctctcgtcgccctcggctgaccccttccctccgctcctctgtgcctctgctgccgcgcctcgctccttagcgacaagatcgccgccgccatccgcgagcacctctcggcgcccgatctgacgacggcccaggtgctcgaggccgcgacctggaagggcggacgcgagatcgcaaagacgcttcgcgccgacaccggcggcgggccgccgctcgagatcatctcggacgggaaggggggtgcgtcagtcggaggggccttctggcagtaaagcaacggccgagcgcagcggagcaagcaagcaagcatgatcagagacgaagcagggaggaaagacccccgtcaggaacgtaccgctcgaccaccttccatccggccctaggagctcggccccgagcacgccgctcagcttcgcgaccggccctcctccctcgccttcgtcgtcgtcgtcgccgtcgccgtcgccgtcgccgtcgagcgcgtcgtccagcgcttcaagcaccttcccaacccacgccgccgcttcgtccctcttcttgctgacccgcccaatctcctcctccgcccgggggggtggctgaatggagtcaagctcgaggtcaaggatgatcgagaggacgaggacgagctcgtcgatcttgaggaatggggcgggatgggatgtgagtgatgagaagagagaggggcgggatgatcccgacgtcgacgaggtcgaggacgagccggacgaatcgctgccggaggtcgccgccgaggaggaagacgatgcgaacgaggcgtttgacgacgcctggccaagcgaggagcggacgacgcgccttccgtttccgggcgaggagaggagcgagttggcgtttgctcttgcgttgccggcggtcgaggtgaggagagaggacatgcgttgggagggggagaatggggtcgagggttgaggacgaagggcgagggaggggctgacggacgggagactcaagtcgtcaggctgtctgtctgtctgtccctgacccggcgaatgagctcgatcacacaactttcgacatgaacgtgcgactcgagtgccaaagaatgcctcagccatcgcatccgtctcatatccttcgcggcttgttcttcagcaccgagcttgggagacggcctcggatgtcgattgactcaggcgatgcgcagcaaaaccggcgatggctcggctgaacggacggccttgaggaggagagcccctctgagcatggcccatagagggagagagagagagcgacgggcgagagacaacagcctgtctgaagaatgcgcgtctttctcaatcaaccggggatgatggagagcagtagttaatgtgaactcgaccagctctctgctgtctgccgtcgtgtcgccctgcctgccggccgcgcggccctctctctctctctctctctcgtgcgccggccgcttgcaacgactgccacgctccgatccaccaccacctcctcctcctccttcctacctcgaagcatgtccgccggcctcatcaacctcgctcagaagcttgccggtccgtcctcttggcccttcctctcagactgtaccctggctcctccctcccgactgacgcacctccactgccttgcagtgcccgccttcatcggcgtctcggccctccaggcgtcgatctacgatgtccctggcggctatcgggcagttatgtttgaccggttcaaggtccgtccctttcgtcgttgtcatcgtcgtcgttcgccgtctggctcgtgtgtcctgcagggaggtgggagagagagagaggaaagggtgttcatcggatcacccggcgagtcggtccagcgagtcgagctcgagctcctcctctgcaccctcctgcacctgaattactctgccacatcctccattgctcgtctcgcgcttcggtctgctgacccctctttgttctgtttaatgctatcccctcctccagggcgtccaagacgtcgtacgtccctttcccctcctcctcttcctcctcctcgacacctgccccgccctgcctcgccaccgacccaccccgccttccgctgacaccttcgcttccgctccaggccaccggcgaaggcacgcacttcctcatcccctgggtccagcgggcgatcctctacgacgtccggatcaagccgagggtgcgttcgctgtcgtcgacggcgttgagctctcgaagggcggggccaggcaggcgggcgctaacgtccttgtccttcttgctcttccttctcctcctatctttgctcttcccctcctgctctgcccgctatcgccctgatcgccgccccgccccgtcctcttggttcgtcccggagccggctctcgtctcggtcgcatctcgtcctgcctcgcgcgccgtcccagcccgcccggcacaatcgacggacggatggcgccgccacccaccgaactttcacgcacgcatagtcggcggcggaccgggtcagcgacccgcgccaaagccagagacgagacgagatcggcaatgggtcgagttgacctcttgatttctccgcacctcgatgaacggacagtgctagtagacctcgggggtgtgccctgttgcttgcgccccgtgaccgttcttacgccccttgaggtcggacatatttccgaacagggacgtcacagcgcctgacgtcagcgcacctctgtctagcctattccctctgatcgtctagatgcctctgcgagagacgacgggtggtcgccgtcgggcgtcaaacggcgcagggagggcgcgtcagagctctcttgtgcgatcgagcggaggtcgattccatcgcgcgccttcgccttccgcgctctcttcctctaaccctctgttccatctcgtcctctccctcttccatctcgtcatctcgtcctctcgcaacggtctatcgccagctacttcgcactcgcacctatgtctaccctctggccctcgtggctcccagccgccctcccaaccccgctcctcgccctaccgcccttccctgcgctctcgcccgcgtcgctcaccggcttctcggcattcgcccatggcgcgctcgacgtggccctcaagaacccgagggcgctcaaggaggtatatgccagggcgggtgcgtcctctctttgctttctcaagcattcaggcaggcaggcaagcaggggctgatgttgttcgcccttggacgagctatcagacccgctgcactcggccgtcgcatttgccgcgctcaactctgcgctggtctggttcctcggcgaggtgactggcaacgtcagccaggtcgatcgtgaatggtcgttcttgcccgtcatgtcagtcccgcttcccgccgtcaccgacctcgctttccccggcgagctgactgccttccctcgccctcgccctcctctcctcttcttccgtcagctacactctccacttcacgcttcaccctctcctcacctcgtcggctccgctcccaacctcactctccgcccttccctcctacctcctcaccaacctatcccctatccagctcctcgccctcgccacccagctcgcctggtctgcccggctcaccttcaacggctggcgccgcggcttcttcaaccctcggacggaagactaccgctggctcatcctccgcgacaactggcccaagggcgtctttggctggctcgcctggcgggtcttcaacgcggccttcatcgccgtcatccagaatatcctcctgctcgccatcgccctgccgtcctacttcctccttcttcaatcgcccgtcgccaaccgcgagccgctcgcaacctacacccggagcgagctcgctgccttccagaagcctgcgtcgccctcgccgacgctcgcccactacgtcctcgccggtctggcgttcgcctgcgtgctcggccagtacgcggccgacggccagcatcaggtcttccaggcgtggaagcacacgccggccgagcggcgcgagccgacggccacctggcggctgctcggcgggctcggtggcaaactgacgtttgaccggtacgactttgtccggggtttcatcagcacgggcctctggtcgtactctcgccagtgcgtcgtccctctcccttcccctctaacccgcgcgagagacacccgctgattctcccctttcctcaaaccccctcgcgcgatggtgcagccccgccttcgcgctcgaacagaccttttggtggctccaggccctcttccccttggtccccctccttccctcgctcctcgcctccctcccaaacgcgcctccaccgctctccgcacggccttcgctcagtcagtggcaagccggtcggtcggcccgctcgcgaccgtcggcgggcagctcgtgagagatctgccggtccaggctgtcggacgaggaaacgggcactcacagacggacagactcaaggcgcggcgctgaccagccctcgctctcgctgactgatctgactggatgacccagcttctgactggcggccgacaacagcctgacttcactcgacagagagccagcgggcagacgtagcaaacgcatcatcacacacgtcgtcgtcgtcgcgtacaagacgtgcctcgcaatcgaggatgagctcatcttgcctcgcaccctcaaacggccgcctgcaccttgttccgacctcgtcgccgaggtcgagcggatcaccagaggggctcgtctttaacgtcaggctcgtcctggacgtcgaacgcatcggcagcctcggcggcagcaagagaagcctctcgctgagccagccagcgcgtactgcagggcggccgagcaaacgttagcatctcgtcgcatcgccgagggacgcagcagaaaatctccactcacttggctgcttcggccatcttctcggagatctgcgctcccctctcacacgaccgctttctgcaaagaggtggtgcggcagagatcgattagcttgccctggaatcgggcttcgaacaacgagcacgcacacaaaatcgtcgtggccgtaggggccgccgtgcagcttgaaggcaaacgactcgacggcggccagtcttcggagagggcgaagttcagcaagagctccgttgtttggctgagcgacaggacaagagaagaactgacctgtgcttgcccttcgttcgcgaggccttcgccctgcccgtgctttcgtctgcgtagctggatccatctccagagtcgtcgtcttcgtcgtccgagcccgaatcgtcactttgcccgtagtgccgcacaactggcgcaggtcggatcattccgagctctttctctgtcggcgatgagaattagactttgtcagctcggcacgatggccgacgagagtctgaacgactgacgcgtaagccggaacacgtagtaggttgctgccagcgaaaagcgaatcagagttgtcagccatgctcgaccccagatgacaagcggcgagttagaagaaggcccgaccaccgcgactgataagtgacaggttgacgacttctgcaaccttggacctgcagaacgcaagaagcgagcaagtcagccgctgggcccgctcgtccagatgaggaagaaagcgcaccgccactgggacgggaacgagtcgaacgggccggcaactggagccgcccgccgagtccgagccctacgttcgagggcacggcagtcgacctcgctgtgagtgtcgcggtcgcaggtcagcaagcattttaggccgcagatcccgagcgctacatcggacgcactagcctggaacgctgctgaggagcacaggtcgtcaaagtaagaaagcagaagtcagcgctcgcaagacacggacgccgtgcaggctacgcatcgacgcaccgtttctcctcgtccgtgagttcggcaaagatctcggcgtcgaagaggccaggcgcgacctccatcattgccttgttcttgcggtagacgcgttgatggacgtcgcttgcaatgacggaggtcgccgtctcctcctgcagcgcctcacgctcgcgctctccttctttccagcttgcctcggtcgcgccccatcgttcaccctcaatcgggtcgaaagcgctgcccgtcacgatacggcggccggcggaccaactatcccggatggggccgcatctcttgacagacgacctgtttgtgaagttgtgtccgatactgatttggtcagcgtagcggttgcttgaccaccaatttcggcaaatgtcgtcaggcgaagtcgcgcccagccgaaaccacttgatctccggggcaaggagcacctgttatgggcgaccggacgaagtcagcggttgccttcatattcgctaatcgggccgtttcgcttacctgccagacgaggccggtgtagcacgagcgcaggtagcggtttgtcccggccagcgcgaggtggtctcggagctgcgacagcggcggatacaagcgacgaggtcagcaagctcttccggaagagaagagaaagagggagaggaggggaaggaaaggcatcgacggctatcgctaggtcttcgagcggcgagcaggtgggctcgggaagaagggtggaggcgagaggaacgcaaaagcgtcgagaagcacacaaaggtgtcgaggacgaggacgagcgggtcaacccgtcaatcaattggtcggtcagtcggtcaggtctttcggttcggtcaaacgagtcggagggaacgatgcgacgcccacgaagaacccgctctttaagggggcggcggcagccttctaaaggcttttgcaatgcaaacgtcaaaaacgcatcgcatccctcccttcccgcgtccccgctgtccgcactttatctaaaggaagaagtcgtccgtcttggtctgctgcgacccgccgccgccgcccgaagcaggcgtcgcccacaacgactcgcgccgcttctcctgctcgatctgggccatcgtcttccctcccgctccgcccgcgccgcccgcagcaccgccagtcgtcgagggcttgccgagcgcgccaagggacgatgaccagaggtcgtcgaaccctccgaacccgcctcctccgccgccgacggctgccttgcttgcaccgccggcggcggtgggcgcagcgcttgctttgagcggcgcgccggcagcggcagtggacgacgagatgggctgcatgcccgcgccgtacgtgcccgaggtgtagtttggctttgcgccggccgacgacgagccggcgttgctggaggcaggaagggggttgctgaagcccggtgctgcgggcgtacgagcaggggccgcgtcgaaaaagtcgaacgggtcggcggccgctttcgccggcgctgggggcttcggaccggcggcggctggggcgagtggctttgcggccgtcgtcgttgatgcgaaatggctcgccgaggccaaggtcggggctgactggaagtcgtcaaagtcatcgtcgagggtcggggcggcaggcgctgggtgggagaaagcgggcgcaaaaaaaaggatggggggagaggatggtcaacagacggacgacagtgagcgcaggggggcggaaaaggggacgttacctcccgctgcggcaggaaggtcgacgacgtcgtcgtcgtctccaaagtcaaacaggtcgaccgctttgaccgcctgctgctgctgctgcttgcccttcgccgccacactcaccttcccccctgccggccgccgccccgccgacgctccacccggaggcggcggcggcggcgagttactcgagctctcgtcctcgcccgcatcgtactcctcgaacccctccggccgggtgctccggctgtcgtgaaaccctcccgacccgcctcctcctccggcgcgcgaggaaggcgagaacgagcggtagatgtcccctgaggagccgttgcctccgccgctgccgagcgagtcgctcccgaagccgccgtaccggcttccagtttgggtctggaagctcgcgccactcagcggcccgcccgagaagccgcccgaaaagccgccggcgccagcgccgaacgacgacgacgacgacgagccgtcgttgccgacgcccgtgtacttctggcggtttgtctttgctttgcggcgctcggttcggatcttctcgacgtccgagaggagctcggcaatctccttcgcgcggttccggactgccacgaaccgcggccatcaaacgtcagatctcagcttgaacttgccaagcaacgagaacaaagcggcggccagcagaaggcagaggccgaggggtgcgggcggaaagaacgcaccgttgattccctggtccttgcccttttcgtcaatgtagtgaaagttgcggagcatcttgacggttgagacgtgcgaccgggcgtcgtcgacgacgcgctccgagccgttcttgacgagatactcgagcaggacgagcgcctgcgggaaagggttgcgcgaggagggggtgagcggatacgctgactggttggacgaggggcccgtctggcttcgatcgctctgggcaaggacgatgcaaagtactcaaggggggcggcgtcttttgagagcttcggacagtcttatgagcatctggcgtgcgcaactcgactaaaggctgcgcctcctcccctctgcgaggtacctcccatcgccccttcgctgcacgcttcgtctgttcactgagggccacggaaccccatgttatgatcctacgagcgacccgaaacggcctcgtcctccctgatccttccagggccggtcgccgcccctctgacagacccgggctcaaagggcaggacgtaaagacaaaaagaagtgctagattctacagtggtctggccgcaagcgagcggcgctcatcagagcgaggaatgggggggcgagcaaaggcgggtgaggagctctttacttcttctcggcggcggcgtggtccttctcgagctgggcctggcggaagagggacgccttggcggcggacgacggtcagcccggggccaagtccagccaaaagcccaatctctccgtctcggacagcagccgcggcctctccctacatcggaggcccgtcgcactgcccaagacaaactgggaagacaaaggtgagggcgagggggaagagaaaggaagcgaaacgcacaatcttctcctcctgcgccttgatgtcggcctcagactgcttgcggagcgcagcgagcttctccatctcgcgctggcggacaaacatggcctcctgcgacttctcgcgggccctgcgtgcagaggagaggtgagggacgacggaggggcgagtgtcagcgagaaagaagggctaagaagaatggtgcctgacgccagcctcgcgggtgaaaatcccccagcaagcggtcggtctgcaaaatgacggcgtgcgggccgacagacgaagacaccagacgaaggagggcaacgtactcgaaggtcgaggacgaggcggtcgcgccggccttctcgcccgacgacatgaagcgggcggcgagaggctgccggcggggaaagcgagatgggacggcagccgggtcagcgtgcgagacaagaaacggacgaaggtcggcagaatggaagacggacggagcgggcggcgcgcgagacggaacggacggcgaacattgatcagagagaggtgtgggtgatttgggaaggcgtgcaagggggtggggcgagagtcgtggttggatggccaaggggggaggggagtccttcttgctctcggccgaattagcctccgaccccactcagcgtcatccaaccaagcgatcgacccgaccatcgagttagccctccctccttaccgcctgcccatgctcaagaggcagctgctcgctctgctcttttgtcctcgacctagcgcatacactcgatcattctccttaccgcctgccgccgcctccacccgccgccgcatgtcgtcctcctcctccaagaagcggcctgcttccccgacgtcagccgacaagccactgccagacgccgttgcgcccgaggccaagcggcggcacgttgaggccgatgtgccccagccgacacaggagggcgcggatgaggccaagagcaaggacgaagccgatgacgactggttcaaggggatgctctgtgcgtttggccccgcgcgttgtcgcagctcccttttactgttggacgaaccctcgacattatcacgcttggaggacttgactgatagcattctttttctctgcttagatccacgcgtctcgacaattgaagcggctgaagcaaaggacgccgatccgccgctgctcaagctcgaggcgctcctcgccgatcggagccggttgaagccggcgaaggacggcggcggcggcaaggccaggtcggtcgtgttcctgctcaacatggaggacctgaggagtacgtcttttactcttgtagtgtgcttgagcaagccagggggtggctcaggagactggcgaaggacgagtgggagcttctctggccgatgcagagcaccgcgcagtcgcctctcccttccgtgcttgagctcccccccaaggaccgcgccagctgacccactccctccttctcatcggagggaggaagggaggggagggtcgagaggcgcgcggtggggcgcgagcggaagactttggtcgtgccctgccataccatgccagccaagcgagcgagcagagcacgggtcgaggtcgtcagcatgagagagacgcgaggttaagcggcggacgggagctgacctgcgtcaacagcacgagcgtcgcgccctcgccgacccttccatcaatccacacccgatcgccaccgaccaacccgcctccatagccgagcagatagacgacgcgcgtcttggccggagccgaggcgagaggcgtgggcgagatgagcttgagggggtaggcgaacgagagggtttgaaagcggccggaggacaagaggtcgatgtggcccgagccggcggggagctgcttctggcttgttctggcagggctggcggaggatggcgctggtccttgcccttgcggcgggcgaggtgcgaacatgcttgcctgcgtgcgtccgatggagaggagatggccaacagaggagaggcgacgtcggagggagcagctaggaagcgcggctcaaagcgcgacgcgcagcagcttcacacacaacgcgacgcgcgagtgatcagccgacgaccggcgtagggcagccagcgggcaaaatcgggagagagcttgcggtgtttccttgcagcatgaccatgtgcctcgcaccgtccgcttcttcggcttggcagaaacggcgttgtcgaacaagcctttcttttgacttggcctagccctcccgacatgtgcgcagacaagcgcccagcgccccgattgacctttcatccttcccaatccatccccttccctcctcctcctctcctcctccgccgctgccatcggtccaacagtcgatcgtcgtcatttatttcgatattttgcagcgttactgctggaaggacccgctctgctgggcttggccgcccatcgcctgaaggcgctcgccaactttggcgttgacctcgaagaacttggcgacgcaactggagagggagggggcggcgagttggaaggggcggcgagaggagtcggcgaaagatgaggcgaggtttgaagaggagcgtgcgcgcgattgagggcggaggagaggagcggagcgtttggtggcggaggagcggcgaggagcgagggcgaggagcaatgcggcgtagcgcagagtcgagcgaagggaggaacgcgcggagtgggaagcagagcgacatggcacaggcgagttttcaagagaggagagacgtggggcgcatggcgtggtgtggcgagggcgagcccgagtcgagaagcggagcggcgcagaggcggcgtaatggggagcggagcgagcgaggagatgcgcgagcgagtgggcgagcggagaggcgcacgcgtgaccggcgaggcgagcgagcgcgggcgtgcgtgaggagaggcgcaggagggagggcgggcgagcgcgtgtagcggaaggaggtgatgaccgtgggtgagagggcaggtgcgagcgagcgaagggagaggaggagggtgggagggagaggacgagctcgtcagtaactgtgcaaggggtcaaagtgctacctctcgagccttgcccgcgcaacgcaccggtcgacgcaaacaccctcgcccttgttgagctcgccctccttgtagacgtcgctaatgcactttgtgtggcagctccggacgagccggtcaaagatgtcggagatcatcgagagctccgtctcggccatttcaatctgggccgggttaatgccttgctgcatgccggcttggggacggttgttgaagaaggactgcgggctgggagggtcagcaaagatggcagcagcggactgactgtgtgggaaggacggaccatgttgggcgagtgaactggacagaggatgcagggcggtcggtcggagggaggagtgacgccggacgggctgcagccggcctcgccctggcttcaaactccgccccgccccgcccgcgcgtgggcttgtcggcctgcctcctcctccttagcagccgacccctcttcgcgtctgacgtgagcatctcaaacgccagcagatcggaagaaaactcgagcgtttcaagggatggcaccgactgccaaaggaccgaagtgaagtccaggccagagatgctgagcttgcgtaaatggacgagggacgaaagggcctcggctggaagggcaaccgaatcgtgaccgtagccctcgagttcgagcgagcggaggttgaggaagcacccgaggtgatctgagagcaaagttgcgttgtcgagtgtgatgtcgaggacctccagcaaccggagagtctgcgagttgacgaccgaggaaagcgggacggcgatgtgtcccggaccgggctcgaccgtagctaagcggatggcaagcttcgacaggcgcaagggcgaggaagggatgtcagaggccggcaagtgcccggtgaacctgagtaccgagacgtcgacaagagtggggaagaggtggctcgtgcggagtaaagaatagaggtcccagtcctagcaatcgagctggcggaaatgccgagcgaggtccgagtaagcctggatcatagccggcagccgactccagttccaactgccggagaagcaaccaaacagcagactctgagcctcccctgcatgagagggagggaggaagttagctatgtgctctgacggatgccgctgggataggagtcgcgcacccgccaagccggagagacgaggctgagcgtcgacagcgtcgacttccacatgcgcggccaccagcctatgaggtcagacgctgcctcccgaatcactagcagctggatctcgagcggcagcttgggctgctggcgggcgtgctgcagacgagacgagccagaggggggccgggcgtcagctcagctgccggctggccagctcggatgcgcgacagcagacggcacgcacgacacggagcgagcggcgcatgctgacgagcgattggggcgagcttggagctgtgtggaagcgaagggcggacgagaagtgaggaactaggtcgtggtcaggaggaaagggcaggcaggcgcgtcgggcgaggacaaggcgacggctgctgtgctgcgcgccgttcggcccggctgccgttgccgctgctgccagcagtgctgacgacccagaggcactttgcgagcacacgtcagcaagggagaaagggtcatgacaatcgtgagagcagagtaagggcgacatcagaagggcgggcaaaaagcggaggaagggggagagatgagcaaccgacggctcaggcggcaacggccgtcgagtcttgagcagaagcgttctgccggctgtagtgggcgaggttgtcaaacaggccggcgctgtacgacgagtagccggccctgagggcgagaaaggagggcaggcgtcagtgctgcttgcgaagagagtgcgagtgcgcgaggagggggaccgacgacatgcgctcgctcttgggaacaaaagccgacctcggcgcgggcgtgtcggccgagactttggtccacgggtgcgggttcgaccgcgggtggagcgagacgtcgagtgtgtcgcgcagggtgtgggtcgtgatccaggcctgccaggagcgaaggagcgggagtcagttgcggcacgggaggggaagggggacagactgccaatcgaaggggggacgcacgccggcagagagcgagaaggcgacgacgccgagaatcgggtagcactcgaccgggatccggcgggcctggcggaggaggttggctgccatggcagagggggagggtaggcagagggtgggcagaaggtgggctgagggcgagggtagagtgggctgagtgacgatgatgagcgtccctccgacctgcgcctggctgcccttcttatacgaccgccctcctcgccacgctgtcagcccttgcgtcagccgtcggcgtcgcgggaagggagaacgaagaacgaggacggtcgtcggagggaagacgccgccgccttcgaccgtcttccgacgcctgccggcccgcgcagcagcagcagcagctcgtcggagcgacgacttgagggccggcagcggaagttgcgcaaggccgagcgacttgcgcaggaggcgagggaggcttatgatcggacgggctgacgcgttgaagcgctgactcgctcactcactgaccgacgatgcagaaagaaaccgtgctgatccggaatagtgaggagaaggcgtgtacgtgcaggcgtgtatgtgcaggcgcgtgtgtgtgtgtgtccgtgtgtgtgtgtgtccgtgtgtgtgtgtcagagagagagtccgtgtgtgtatgtgcaggtgcaggtgtgggtatgggtgtgggagcaggtggtgtgtgggtgggagggtcgtgaaggtcgtgcaatgctcagagcgaagggagagaaggcagagtcgaaggggagaagtggctagaggggtgctgcctgactagaagaggctgctcgacgaaggaggagtcgccggctggatgacgatcgagcactgggcgtgcgagctgtagaccggagcgcgctccgactgggccgtgcggggcgggcagggcgagaagggcaagttgaagcgggtcgtccgagcctcgacggtctcgggcatgagcgaggacgatgcgaagacgagggcactgttgaccgcagtgttgacagcgagggcagaggacgctgacgacgacgaggccgagactgatatggaggccgacgaggaggccgaggttgaggcttccgtggccggcggcggcgagggcgaggcggaagccggagcgacacgggccgagcctgcgaggcgaggtgaggagggagggtgaaagtcaaggtcagtgaggatgctcgcgacaggcaggccgagaaggacgcgtcgaggcggggacgtacgcttgggctacttgcgggtcgcgttggcgacgacggtccggcgtaagttggcagtggccgacttagctgacttggtcggcttggccgctttgagggtgagggtgtaggataagacgtgcgagctgcgagccgaggcagggaggcccggttagataagggtggcgggacggaggacgagagaggttgcggtgcgacgcgacagcagatggagagacgtccggggcgagaatggccttgacgaggtcgtccttgcgcattccggtggtcttgatggccttcgactgaagcagagaaagtggatggaaggaggaaggtgggcaaaaaagaacaacaaggagcgatgcgtcagtcgcgagccgagacagaagacgggaagggtggcgagacggcgggagaggaaggagttgacaagcaggagcgagggtagaaaggcgaggacggaggtggaggaaggacgtcggacaggattagatgaggaaaagataggacggagacgtaccttgcactagttggtgaggatcttgacggtctcgccgtagagggcggcctggttgatgcttccggtcggcatggcgcgttggtcttgtgttgttggtggtgttgatgaatagaaaggaaatagggcgtaagggcaggaggtgtaaggagcagagaagtcgtaggatggctcggagaaggagggtggtagagaggatggtcgtcgggcgagaggacaggctgctggacgcgcctgcctttgagcaacggcgggcgaggcggacggggatcaactgttgctgcgcggcgaaccgtcgaactctctctctgaaccccctcgcctggtgcagcatgcctccaaggactaatctcgccggacggcaagagtcatgaggatcgctcggctgtctataagatcgtgctgatccgtccgttcacgctcgacccatatgagctcgacaactcgcacggcaaccctccttcctcgaccctccaagccacttacaccctcaaccgagcggagtgtcagatgccacgtccctgcccgtcggttcaccatggcgggagcttcagctgctagttctgatcgagagcagagcaaggcagaccgaaaggataaaagaaggaccggaagaaggtacaggttcgaagctcgggaggggctgtcgcgactcgacgaaagagtcgacggaggctgagactgcgctcgtgagccgctctccttcctgtctctcctcacgccgccttgctgacagcctgcccctccctccagtcaccggcgtcctcgtctacttcgcctacgaggaggacgtcactccgccagcagagccgcccgcggtcgatgaggccgaggaggtcgtcttgtcgcaataaacggctggcctccatctcttctgtctccatctcaaatatcatagacatctgtctcttggggactttgtaaccctcatgctccgatctaattatgccacttgcactcgaccaagctttcggagccagctcgtccgactccagtcagctgactgccggtcgatcacttgaacgactccttgaagagcaccgtccaggtacggcgttcttgcccgctcggtgcatgaagaagggaggaaaatgtaccgagcagttggcgtcgcgacgatggattgcgacctcgtctttgttcaccatgtccttctacctcttgatcggactagcgcaggcagtcgcatgttgtacgaaagggacgtctcgaggctctgctgcgaattgagggtgtacgtgtccgcgtcgcaagctgattgactgatctcgggcccttaccagccgacagtcctcggttgagcgggtcgagaaggagcggatggactagctttattttctgaggctcaagcgacctctaatcaacttgacacatcgagcaagatcagtcggacggaagtaaggctgtttggtggacgcgtctgcggcggaagcaggtggcgcgcgcagcaactcgaaggctgttgcccgccgtgaacgcgtcccgctggccggtctggctttctctttcgacgtccacctcctccttcagcccacccttgcacccttagattcacttcaatcctttcacccttagcctccagtcctaccctctcgcacgtcttacccgccatgcctcccgcgccgctcgtctacacgtcgacccggctccagcgcgagaccatacccgtcctcgtcgctgcttgcaaggtgcgtccctcctctcagcccgtccatcccttctcctttctccctcctgtacctccttttgccttctctcattgcgcctatccaccccgtctcgcgattctcgtcgccgtccttttcctcccgcccgcgttctcgcgactgacgcccgtccgttgtctgcccgccacccactcctttcggccgccgcctttcagatcgccggcatccctacgaccgacaagatgctcaagaaagacctcgtcaagacgatcctcagctcgtacgtccgctgccgcgttgtctcccctccgccgtcccgtccaagacgcgtcctaacacttctcgtttatcccggctcgacgcatcctccttcaggaagcggctcgacgccttcaagattccttcgggcacgaagggcgccatccttgccgacatcgtcaacctcggccagcgccggttgggccgcacccagccagcgagcacaaagccaaccaccaccaagaccactgagcccaagcccaaacccaaacccaagcgtccgtcccggctctctgtcagcttccgtctccctctacgagcgcctttctgactcgtgcttccctccttgaacctccaggcgcggcgcccgtcgtcgaacggccgcccttgccctcgccgggcccgaccctcttgatgccgtcctgcgcccgcggccccgaccctaacctcaacctccacgtcactggccggcccgtcccactcgcccgcgcccatcgtcgtcgacagcacgcttgacgacctcaaggccgagaacgccgccctcggtgctcgcgtggctttgctcgagacgaaggacgccgagcgcgaggcccagtttgtcaacgtcaacagcgagctcgccgccctcaaggctattgtcgtcgcgcttcagcagcaggtcagcgatgtcgtccgcgagaagccggtcgccgtcggagccgcagttgtagaggcggccgccgtcgtagttgaggctgctgtcgtcgttgaagcacccccccgccagcaggcgagtcgtacgccgctttgccgtcgcctagcccgacacgcgccggccgggggcctacctcgacctcgggcatgagcgcgcggacggcggcggcggcggcgaacgccaggcggtcggttgggtcttcgcgtggtgcggggcgcgtgtcgaccctcacgcgattgacctcgtccggcggcgaagaagaggaagacgacgacatcgagctcgcccgtctgcaaagctctcccctttcccgcggccggccttcccgcgcagccacctctcccggcgccgccacctccgacggaggagggatgaccgactactcgcccgtcgcccgctcgaggggaagaccgtcgttcgcgccgtcaagggcaccgacgagccccggcggcgccgcggtcggagacgagacggtcgagtttgaccggtcgcgctccgacgatgacgtcgacggggagggcgacgttcgattcgacgacgacgacgacgacgacacggctgctgctgctgggcggcagcaggaggacgacgacgttgagatggactggggcggcgggcagccttcgtctgacggtaacgcgccgttcgacgacgatgtcggcggcgggtacgacgagaacgagccggcacacgatgaagacgccatcgaggaggaggaggaggaggaggaggttgtgccggctcggtcaaagacgaagggcaagcggccgcgcgtcgttgacccggacgacgacgacgacgaggtgcctcgctcggtcgtagaggacgacaacggcgtaggtgccgaggaggacgccgaggaggaggaggaggaggtccggccggccgccaagggcaaagggcggaaaggcaagcccgcgccgaaacgggccaaactccccgtcgaggcttcctcgaccggcgccgctgccgagaaagccagccgccgacccaccgcgtcgtcacggacgactgcagtccagcctgtcattgtcccgctgcacgactcggaccggacgtcctcggacgcagacagcgacaacgacgacggggcctcgcgccggtcgaagcggacgcggttccggccgctcgagtattggcggggcgagaagctcatctttggccggtctgcgccgggcgcaaggaaggccgcgtgcccggtcgtcaaggccgttcaggagctgccgccgcaggacgttgtcccttacggccagcgcaagaaagcccgcaaaggaccgccggtcgcggcggcggggccggcgaagggcaagcgcgccaagggcaagtcggttgagctggaggagatgggtgagccggaggaggccggctgggaccgcgacacgctcgagcacggcgttgtgtttgactacacgacaaagcaggaaattgagcgccgtacgtccttccgtgtttgaccgactttgctcgaggtccgacgctgaccccctccgcattcctctttgcgcctgcttagggatcgccttcccggcccacctgatcgagtaccggacaatgtcgtccgatcccaacggcttcaagttccagaaggtctttggcgacgcgagctttgtcgcggccggcatgctcgagatccccgtcgacggcgagaagccgagcaagccgacaaaggacaacacctatgttgggcccccttctcgttctctcgatcgcgccgtcgtcgctcgtcgctgactccctccttccctgttttgtgcgcttcggcagcttttctacgtgattgaaggcgccgtcaacgtcaagatccatcggacgtcctttacgatggccgtcggcggccagttcatggtcccgcgtggcaaccagtattcgatccacaccatctcgcgccggcccgccaagctcttctttgcgcaggcccggcggatggcgagcgacgaggaagacgtgccgagcgtgctgacggcgagccaggcgccgccggcgggcgcgcaggtcgcgggcaaggcgacaggtggttcgtcgaagcgcaagtgagcgccaccccccccccacgcacgacgttgccgttcagcctgacggctccttcgccaatgatcccccgtgcgccctcgagcgagtcagcaaagccgcccctaaagacgacgtggtcaagcctgcgctcaatctcgcgaaacatgaggggcatcgtcggtgcctgactgccaaggtagctgtgaagctcggccgcctcgtctgcggcccgaccgccttctttccctggccgggtccagcgcgtgatggactttgaggtcgggatgacggtcggcgaggagagggccgtcgcttggatgacgggaagggaggacgggaggtaccaccgccggaactggcgggcgggggcaggagggaaggtcagtaaagatacaagcgagggggcaggggaagttcaatctagggggctacgagctcgtgagcagagagagagcggcaggcgagcgagcgtcgagcagaaggagcggcgagcctcggggcagacgcggcctggagcccaagggtcgttccgacctgctcttcctcctgccctgagctcgatcgaccggccccaggcccttcaagagcgggccgagcgatttgatcgctagcaaatagaggagcaagagggcgagagagaagcaaggggagggggggcagcaacgcacgtagcggtccttcatggccggcatccaatagtcgcgcaagagctgcttgcacgagccaaagatcttgtagagcgagtcgcgcgatttggagaagtcgccttgagatttgagggcgccgttgttgcgctggtagaggttatggatgttgagcgggtgccagtcctgcgagagggagcgggaagggcaggctgtcagtacagaggaggaagagggcaggcaagcaggcaagcaggcaacgcaccgcgcggaccggcacctgggggttgtcgtagtgctcgagcgggaacttgttgccgcgcgtcggctggacgacccggagccgggcgcgcagcgagggagtcgggcgcatggcgaagggtgaggtctggctggctggctggctggagggagggagacagtaagagggaggagggaagacgacggccgagttacgcccgatggttacgggtcgagtgacttggcgcccggaacttacgcccgctctctcgctctcgctaacgcccaccctccctcccctctgcagccttcacaatggtctcgatcggacgctacatccgcaatgtgcggcttgtcatgtctgcctgcctttcctaccaagctgaccaagcttccaatcctaaagatccgccggacaggccccatgtactatctccgcgagatgatctcgtccgtccccggcctgcctgtaccactcctgtcctttggccctccgactgacacacacgcttctctcgcacacagcggccagggagacgccaagagcgggactttcatgggcaaggactcgtccgtcccctttctctcctttcctcctctcgcgcaccgaggacggtggtggcaggaagagcgcgcgctgctcggcccttgcggcccggcccaatcgcagtagcgccctctcgctcgctcacccgcccggccgtctcagctcgcttcgtccgctcgcaacgctgacaacttttgactcctgctcctgtatgcgtctcaggttcggtaacaaggttcgttcaaacagtccctcttcctgagcggctcgtccgcgtcaggccggggggttgagggttgggctcggctcggcgccgagagcaggagacgccctccctgccacttgccttccctgcctcctggcccttgaaacccctcttccttccttcccatccccatctcgtacacgacagctcgctcgtctcagacacctctccccaccgtccgaaccgacgccctaccaaagctgacacccccctccttctccctctcttccaaccctgtatcttatacacatctccgagcccacgagactagcgctcatctcgtatgccgtcttctgcttgaaaaaaaaaaaaacaaaaacctccgcccccgaaggtgtcaccccaccccctcccggtcgcttccacctgaaccgccgaatggacccctccgtcaggcggcagttccagaacaagcgccctcgtctgcttccagtgggcaaagtttgagctcgatccgacaagatctcgctcaaccctgaaaaacccccatctgggaccccttcagccggatagtcggacacccttgacgatcatcgggatgacggctgcgagataatcgggcgaggggcgtcagtcaaagcagggacggagtcagcgagcaacgataggacgcaccgccagtcggcgtagcgcaagcctaggcggaagaaggacggagaggtcagcagaggctggcatgacagaagaacgagcggcacaccttgtgggaggtcgtccggaagagggcctcgaggatgcctccgtgcccggcgagcgcgacgtctgtgaccaaaagtcagcccgggggcgaaacgagccgatcaagagggatcgaaaaggcgctcacgcagtgcgtcgtcgtgctctgcaaacagctcgctcagaatgagctttgctcgccggtccatgctctcatccgtctcgcgcttggtcggcgaccacaagtcgtcgtcctttgtaaagccgggttcgagcacaaagtcgagcggattggtcgcgttgcggacgcggccgtagacggtctcgagctcgaaggccggcgggcggatgtcgcacgtgtggacgccgaggcgctcgcggaggttctgaagcaggggggagggggggcgcttcctttagccacgaggacaggaaaatcggcaggggcagcacgagcgacgtacctccttgatgacaggctgcggagcgcccgacgacgagagcagcacgtcgccatacgagatcgcgagcgtcatcgccgcccgcctcagcgggctcgcccacagcactttcggcaacaccacgcccgcccctgcgtcgcggacctcggccgcccattcgcgcgcgacgtcggccgcttgctcgaggcctgtcggcgtgagttctgggtcgggaccccagaccatgccgtccgcgaagtagagcttggcaaacgtctcgcaccagcgcttgcggaccccgaatgtcagcccttgaagcgaacgagcgagcagaagcgctcgagcgggagccggaacgcaccgcctggccatagaatgcctcggcccggttatgccacccctcgccatgccgctgggcaaacaccagcttgtagcgcgtctccggccccgcagcggcactgagcgctgcgaggtgggcgtcgagcgacgcccagcgggtgggcgagtcgtcaaggaggccgaggcgaggcatcacctgcccgtgtagcgttgagaagcagtcagtcgacagtcgtgtgagagagaggaagagagggactgggcgggacaacctacagcagcgggcaagagaccgtccggcgcgtcgtcgtgcgcgaagtagccctgttcaacctgcgccctcatgagagcacgtcagctttgttcccaaacgcactcgcgaggagtggcaaggggggaagaacggacggtgaacgaccagtcgccccatcttccagcctgcgccgcctcgagcgcagcaaccttgctctcgggcggcgcctcctcctcctccgcctcctctgcgccctggacaagcccgccaagcagccgcctgacctccctgtccgacacagcccaagtcccgacgagcacaagcagcgctccgccgcctgtcggactcgagccgtcggcgagccgcgcgaggagggcccggccggcgtcggtccgggacgttgcgaggccgacgagtgcgagccggagagcgagcttgacgagcccgcccgtcgtcgagcggccgtcgagctcgcctcctccccttatacgctgaccgaggatggccgccctcgctcggtccgtcatgaggccaacagccgtcgtcgcccccaacagccctacaacccccccatcgagcctccgcccaaacggctcttcacgatcggcgtcacctccaactctctcccggtcgagtcgagtccgccctcccttctccggcgcttgccgaacaacaccaaccacgcccaccaacccgggctggcggacgagccgttcgtccctgacccgccagtcaatttccacctctcgctcgcttcctccggcccggttggccgcgcagggccggtcgtaggctccggggcgtggatcgtcgaggtcgccgtcagctggcgggacgttgatgagctgacgggagcggtcgttgagcaaggcggggagacgtacgagctgtttctgaggcggtgaggagggggttgctttttgcatgtgattcttcttttagataaagaagagcggcagcgtgttcggtcgtgtttgttggtcgactgatcagagatgacaacgtgaagcagttagaggaggggccgggacgacaggtcagtgtcgcctgcgccgccgccggtcggacccgccggcgcttgccctgcggcatcttcgcccgccgacgccctctcccccgaccaccagccctcatcgcctcagcagcctaccatgtcgacctcgcccggaaaggagcagcagccctccccttccaaagccaagcaatcgtcctcgaccctcccgccgctgcttgccctccccgcccagctctcggaccagctgcgcggctcgctcaagtcgctcggcgacaacctgaacgactcgctcgagcggggtaagctgcccggcgggatcgagatcaagtgcgtcggtcgtctctggctgctgctgcgagtgcttgcaagggtgactgagggctgacaagagaaggggtgggggtgcgtcgacaggttcgcaccgctgaagggtccgtgcatgagcgacgacgtccttggccgtccgagacgcctgtgagggccagcctgcagacgtcgggctgacaccctcctcctcctcgtcgtcgcccgctctgcgctcgtagttcccagacaccgtaagtcgctggcgtgctcgcatcgcaaggccgcccgagctgaccgcgcgcgccgccgctcctccggacccccccccggcacctccgtcgccaggccgccttcagaccgccgcaggtgcgcctcgtcccgccctgtcagctgatgccgtcctgtggctcaatttttctttgcttgtggacggcagtcgcactctggtcgacgctgctgccaatctgcctctcgctcttcctcttctgctggtcagtcctcggcggtcaacgcgtcagctcgcgcgcagcgcccgcctcgcgtcgccctacatccctcctcctcccagcgtctaacgacctggcccgtctgccctcctcgccctggtccagctcaatgcccttcctctggcccctcctcgtcccctacgttctctggatcgtctacctcgaccgagcccccgcgtccggcggccggcccaaaaagtggttcaagcggctcccgatctggcgccatttcgccaactactacccggtctcgctcgtccgtgaatcgccgctgccgaccgacaggaagtacgtctttggctaccacccgcacggcgtcattggcatgggcgcgctcgcaaacttcgggacggagggcaccaactttagcaagacgtttccgggcatccgcccgcacctcctcacgctcgcgccaaacttcctcatcccgttctaccgcgacgtcctactccatctcgggctctgctccgttagcaagcgcgcgtgctcgaccatcttgcgcgagggcaagccggggacggcgatcgtcattgtcattggcggggcaacggagagcttgagggcgcatccggggacgaacgacctgacgctccggcgccggatgggcttcattaagattgcgatccgcgaggggtgcgtccatcgcgccgggccctccagtctcttctctaggtcttcgctcgccaaggcctgcagggagggagggtcggaggggcgggctgaagggtggcgagggaaagagacgcggcgcgcgcgcgcggtggccaaacaggcgcagcgagcctgcagcaatcggctcccgctattttgccctggccgggctgtcacctcacccggtcgggtccctcgccagccgtccccctttctgcaggttcaaagatcctccaggtcgtcatctctgcgcaaggctcgccgcctctgtccaaaaggcaggcaggcccgagcctggtcactgcagctgcaggcaggctgcgctggcagcgtccgacggcgcgcgcgaagtgccgggggcaaagagcccgaaacggccgctgacggtctgtcgacaagtcgtcgtagcggactaagatgagcggctctcgtctgacagcgacgagcaccagcagactgctgagcgacgttctcagcaaatgggtagcctgctcgagaaatcggtgcagattggagacgctgcaagctctagatccggctggcattggggcattggtcgcccgcagcacgatgggtcggatcgacctggattctcaaaatcgcatcgagagcagagcaggcgctgttagaaggagggacttgtcgctggagaaggacctcaagccggcaggtttatgaaactcggccgagggccgaccgagagagggcaggcgcggtcgcgaagagaccaaggcgagcggcgcgatgaagaggtgcggacgaggggagatggtaggacagcgtctagaactgctggctggacttgatctattcgggcaaagggccaagaggaaggacaggcggtcagcccgggtcaacaagcaactgacgaggcctcgactgcgcgacccgctggcgtctgaggcatttcctggtctgcctgaacgccatcacgcccagctgcagagcatcgagcgagctcaagagcgtagagcgagcctccttcccagccgtttcgctcgtgaagaagggcgtcaacgcaccgtcttgcccgtcttgccaatcttctcggtcaccgtctcgaacggcgggagctcggcctcacccttgaagatcttgacctgctggctgtcgaggtcgacgttgaattgggcggctggacggcattagtcggagtgttagcgagggtcgagcgagaatcgtggctcggtcggaaggggatgaggaccgagggagagggagagggaatggaaggcgacggacgagggaggatgcgcgtgagggcgcgggtgacggcgccagagcaaccgccgcaggtcatgacgacctcgtactggtaggcctggaggagcgtgtcgaccggtatcgccgagaaaggtggtcagtcagtggaggtaaagaggggagggggcaggaggtgggaagatgggtgggttgagcaggttgggacgtcagctcgccgagacactggatcgcttattcgaggagcgcccatgcggctcaaagggacgtgcgacttcagggctctatagcaaggaacagacgatcgggcgtgagcggggagagacgttgtccggatgagcaggggaggagggaaggacgcttgcttgtcagcacgcggtcgggcgggcgacggctcgtcgcaagcagctgtcgcttgacgggccaccgtcgcgggagccagctgcctggaggactgacagacatggttcttgaactgcgagagtgggagtgagagtgtgagggcgggtatgacaggcgggtgatggtcgggcgggcacgaaggcagtcgggccggcgtcggccgagaggagcgaccctgcgcagcaagcaagcacgagtacggcagagatcgacccgtcgtgcgacgatggcagcggcagagcagctcgaggcacaggcccgggttctcagaacggttcatgaagtgagagagatagggcacgaagaggagaggcgcgcaagagggctgggaaagaggcggcgcgcgaggggagcgacgggagggggttgtagtctggccgagtcgaacagggcaggagtgagatcgcagacggtcagccctgtaagcgcactcgagcgggttgacctgccatggccaggcgagagctgcgagcgatggtcgagtaagccggtaagctcggctactcgtcctggccggaccctctccccccttcccctccttttaactcgcccgtctcctcgaccgaagcctagaggactgaccgtcataagcccccggctcaacgagcgccggcccgtgctcgggcagctcaaagtgcgggtcgaagaagccgagcgggtcgaccggctgctgctgctgctgctgcgaggagggtggcgcaggcggcgctgcgcgagccgacgacgatgccgacgggggcttgctgctcgtgctggcacgggcactgctcgtcgacgacgtcggcgctgcgggcgagccaggggcggtcggagcgagggtcttgtaggcttgctggctggatgccatggcggggcgggatggcggtcggccaagagagcttcgccccttccttcctgaccaccaccttgcttctcacgatggccaccacaacccacgacccgctcgactcgctcaaccacctcgaagcctccttctttcaatcgggctactccgcaggcttcgcccacggcgctctccacgggatgtttgagggccgcgcgctcggcaaggagaagggctttgagctttgggaggaggtcggctactatgaaggcgtcgctgggctttggaagctcgtcctcgaccggccccagcggcaagaggcagaaggaggaggaggagccaagggcaaaagggcgttgggccacctcgagacgctcatcggcctcatcgcgctgttcccgactcaaaactcgtcgacgtcgacggcaaactcgcgccctggctcgcccgtcgcctcggcccacccggccatcgccatgtcctcgcccgcccaggacggaacggccagtccgaacccggcggcgcagctcgatagccagggcaaggagacggacattgcggccttgcttgagcgcatccgggcgcgctacaagctcgtctgctcggcccttggcgtccggccacgacttaccgcagctgccgcgtccccctctaccggcggcggcgacggcgagggagagggtcagagcgagacggctgaccagagcagcagcagcagtagcggcgtcgacaagcccgcgtcccgccaggcggccgccgccaagccgctcgaaaagggccaggtcatcgtcaacggccagcagatcagctcgcgcgagctcctcttctgaaagaaagaggccctcgctcgccccgtcgtcgtccactggcccgttctttgtctgcgcagaatgaccgaaagggcttcggtgtagacgctcttgcgagcttcggctgcgctcgcaaggagcaatcgctggaggtccgtccgttttgtccgccatcctctacctctcgctctttccgcctcgggaggccagtcgacgacgtccttactctccctcatccgtcgactgacaacccaactcttccgacgctcgcagggccccctccccccgaaccctcccatgaaaaaatcaggcagagcgcgcactctttgcagacgaagcttccaagaacgccgacactctgcaaaggaccgcgcgcgcgagctgtctcgcaccccgccaggcacatccgaccgttgcttccctcccggttcgacaaagagccgagcgtcgtcctccaaaccgcctgaatctcttgatcccgtcctcgcgtcttttccttcgtcctcacacaccctcataacccaattgacccccgcgcccattcgccctcgtcctttcgtcctgctcgcgtgaggggggggggggattgatacagcgctctcccatgaaaaagcgcacgcgagccaaagagggggggggggggggggggggggggggggggggaagaggacgatggcaaggagggcgtgaagcgtggcgtgagagttaagagagagcggtcggtgagaaagcatgccttgacaatgccttgacaaagagggcgagagacgaatcgtcgtcgctggccaagacctccctcctccctggctgctgctacttctcctgctcaatctcgcccgataaggcgagagagaccgccagctagctaacgtggaagcccgccttcgccactcgtccctcgcccgccccgtcgctcgtcgaccgacgactcggcccacagcctctctctctctccctcaaaagaaagagacaggcggacatcgagcgccccgagcgcactcatgccctgagcggccgacccggcgccgacgccgccgccgacgacgacgacgaagacgataggccgagtgcaagacatgagcggcccggacgagcaagctcgagcgacgactcgagctttccgacgaggcgactggccgatcaagctgggttcgaactgagcgcgccgcccgtcccagcccgtctttgtttcttcccccaggcatgcctcctggggtcgtccaacgacagcgcggtcgtccgacccgagccgcacaatcgccgcgagcgaaaagagcgtcggcgggatccgactttgacgtgtgcctccaaggacacgaatgagccagtagtgtaaaagggactgaccgtccactttggcagcagcaaggtcggaggtggtcatacgcctgttgttgaagctcggttgctgcgaggagagagaggaggaagaagggcgagtgaaggaggggtgtagaagggacgaggacgaggagggaggcacgcgggagagtcgaggggggtaaagacccgattggaggagttgggctttaagggggttcatcagaagggagggaggcagcgaggaagcgcacctcggctcgccttgctcgggaacaggacgggtcgccaaagagagaagagagagagtagaagggcaggggtatgttgcctagcggacagtcttcatagaaataacgatggaggaagggacggtcgagggacgtgtcctgcggtcgactgcgccctccctccttgcccttcgagacgacaagccgccgtccctgtcgtcttctcgcagcaggaaaacagatagcagaccagcagcagcatcagagagagagagagagagagaatgcacgttgggtcagggagggacatgctggccggtgccccgacgcacgcgtcgattgcatacgaggtcggcctcgtccgccgtcattcccgttcgtgtctttgctttcctccgtccaaggctcagcagctataagaaagccggaccatcgccttcctttttcaccctcacccccagcctacagcatgtccacctttgacccgaacgagcatccccatagacgctgtcggtcctccgcgctcctcctccgctgtgacatagctctgacgcccgcttgcctcgctcagacaacccgctgctgaagacgcatgtgctcgtctcgcctcatcggtcggtccctcctctccttgcctgtacacgttagcccgttccaggctgatcctctctcgctctcgtcgccgaccattcgccgcctcgtcctcctccctcgcccgcccgccctggcaggacgaagcgcccctggctaggccagctcgatccgccctcgctcgtccagctcccagcacatgacccggcgtgctacctctgtccaggcgtcaagcgcatgggcggcgagacgaaccctacctacgggggaacattcgtgcgttcgcctcctccttcctgctccgacccctcgcctttccgtctgctcggtgctgacccgaccatctctcgcccttactcctaggtgttcccaaatgacttccctgctctcctcccctccgctccccaccccgcgctggccccctcctctcagcgaccggcgtcttccttgagcactacgagcgcaaagtcttcccggcctcagggtcatcctcgctcctcccgctcgtcgcctcgcttcagagcggaataaactacatcctggcgttcccaaccatgtcgctcgccgtcgcctttccgaaatggcgcaagccagccttgtactttgggctcgggctctcggtcgccggcctgctgggagcgtccttctcgacgaccgagagtgagcccatcgaccgccacgactggcctgcaatacatgccgtcgctgatcaatctcgcccgtctttcctctcctagtgcagctgctcctgacgcagggctttctgttgagcgtcggcggctctttcctctactggtcagtctcaggccagcaatacccgactggctccgatgttgaacagctgacaccacccgtcattgcaggcccgtctcgacctacctgtgggaatggtttgataggcgcaaaggactggccgtcggcgtcttgttctcagggacgggtgcgtctctgttcctttctctcgaacccggctccgggctatacgctaactgcagagggctgcactcaggtctcggtggatttgtgctcgtaagcccagcccaacctcgagcagcgccgcctttggtccaacatctgacgcgctctctcaccaaccctcttccagccgcttatcatcgaaaaggcgctctcacaatacggcttccggccgacgctccaaggcctcgccgtcgcctttgtcgtcttcgtcctgctcgccgcacccctcatcaaaggccgcgtgcccgactcggtcgtctcggccaaccgacgcgtcagcttcaactttacaaagaagcggtcattctggtttttgctcgccgtcagcgtcgtccagggctgcggcagtgagtccctccctcccgtgatattctcgccggccctgacctcagctcccccttccgctgccctcggcggcagactttatgccggccttgtacattccgacgtacgcgacttcggccctcggcctctcgcccttccagggcacgctcgtcctcgccttgatgaacctctcacaggcaggcggctacccgctcttcggcctccgtgcgttacttccgccctttgcgagagttagctgctgctgctagtggcccgcacctgacgccgccctctatgcgcgctcgatagtcgccgacaagcaccacaacattggcatcatcacatcctcggtcgtcgccctcgtacgtgagcccctccatacagccgtgaaaccttccactgactggcgacccgacccgttagctctcggccttcttcctttggggctgggcgacgacctacgggaccctgatcgtctttgccctcgtcttcggcttcgtctcgccgtgcgtcctgcctgcgcgccccttaacgctctcgactgacgccatccctccgcccgccctgccgagcaggtcctacggcgccttctggagcgccttcacgacgatcgcccagggcgacccgtccgagacgatcctcctcttctccatcttttgcgcgacccgcggcgccggtaaccttgcctcgggcccgctcgccgccctcctcctccgcgcgtccgccggctcgcgcttcgcacacgcgagcggcgcctatgggatcgacgagggtcggtggggcgcgacaatcttctttacggggctctgtgcgtctgtcggagcgacggcggcgctcgttggcttcatcccgaagggcaagcgcgagaagaagatgatggaggaccgcgcgacctgaagaagggttgggggcgcgctgtcgacgatgagtctgcgccctttgcaggaaggccggagggaggtggaggaggagcgaggcggcagggcggggggagacagagtcagcggcgagcgaaagagagaggggaggagaagggaaagcaagagggacgaagaaggggagacgcaccctcaaggtcgccatcgcggtatggcgttgccgtatcccagacatacattcgcatccttccatgctggccgtccggcggcgtcgcaaagttggcattgttggtcccggatccgtcctgagcgtttgcaatgacggcgtcggcgccctttccacctttgccaaagttggcctcttggaagttgccagaaagctcggtgaaaccccagcggtaggtcaggtcgtggaactgcggggggcacgcgcaagagagagagagagaaagagagagagaggttaggcgacaaggtcaaagagagaggtgaaggaggacgacgcggagggcgcaccatgttgcacgtgtagaagagctcggtgatggccagatcggcatactccttcggccggagcccctcctcttcgccatacgggaagtcaaacgacccgttcttgacgactggccgatagtttgcaagccagttaccctggccctcccagttctcctgcgcaaagacattgttgccgagcgtcgtcgtcgtgttgacccagcctgctttagggtcgacaatgacgccgggggtcgtcgagaggaagggcgaggtcgagagggggatcgcgtgccagcctgcgggcgagccgaggacgtcgtgaggcgaagcaaggagcgagcggttgccgacagatgggtcgttgacgcccatcggccaaacgcggtaggaaggcttgaacgtcgcgtccttgtccttctttggcgacttcttatccttgttgttgccgcccttgcgcgaaaaggcgctcggcgcgtcccgcgcccaatcgaccgcagccagcacctcgcccgaccggacgtcgaccgcaccttcgtaccagttgtcgaccatctcgacctcgagccgccatacgagccgaagcccttcgtctgtctggagccaggcgggcgtcgctttcgcgccgtctgggccgatgacgcccggggcgtggtggatgtgttcggttggcatttgggcgccgggggcgtggagcgagggcggggcgaaggtcgaggagagggaggcaaggtagggcgttgggttggaagcgagcgaggcggcgagggaggggtcggggtggacgagggcgaggaaggcgaggagcgcagaagaggcgccgtgctcgaccaaaagctccgtcgaggccgtcgtcgaggaggtggaggaggggcacatggcctggacgagccggccgagctccttgaccgcctgcgagaccttctcgagctccccatgctcctcctcgctgtccccctcctcctccttctccttctcattctcctccttctgctccgctcccgcccccactccccttccagatccaaacgtgacctgctcatgcccaaaagccagcaaatgcccaaccgcctcgtcctcggtcaaggcgctcagacgcgcgcggaagtcggccgcggtcgtcgaaaggcgggcgatgagctcggcgcagtgggccgagtagacgttggctggcggcgagggcgaagtggtcatggccgcgtgggcggaggagggcagcgggcctttaaagaactacacccctcgggcgaaacgggcgaacgggagatctctcgtcagctcccccgccccttcagacccgagaagcgacttgcgcgaaagcaaacgcacagagtcgcccttcgaaagcagcctgccgtccgttccaaagttgaggttcgcatcgccatcggcgacctcgaggccggcaacgagctgccggacgaagacgtgcgttgttagggtgtgagggtcggtgtaggactgtttcgggggcggaggtgagaggggaaggaagggagggagctgtcgcgacggacgaccgcaggagtcgagaggtgaagccggaaaccacgcgcatcacgtttcacacccccactcgatccatccagcgctcgacctcctgaagaagggcagagatcatcggcggtctggtcagtcctgagccagcgagtcttagcgcgagaccctcgacgtaccaggcgcgagctctcgttgccattgccgtcgacgtcgcccgaggcgtgcaggatctggaccttgccgccactgtcccttccgagccggctcgtctcctcgaagcccttctcgctcggcgcgtccgtcagcatgacgccaatgttgaagtgcggctcgtagtcaaactctggtagcggcgagggcagcatgccggccggggcagaggccggctcgtacgcgtgcgtctgagcatcgggtgtcggcggcgagagcaggagtagggccgagcatgggtgatccgaaatgtaggcctgcgagatcagggtcgtccacgagcgcgcaagaatgacgggcgggaaggggatgccggtcaggcggacctgctgcgacagctctgcgaaagagatcgatcacggagcattctgagcagtcagcaaatctctttctttagacagagaggaaggacccagagacgtacgctcgacaaagtgcttcatgacctcggccgacgtctcgggcatcgtcgccggcggctgcaggtcaacctcgatgcacgtgtagccgcgcgacgaatacatggccgaccaggcctcgaagccgccgatgctgtcgtcggtcggcgccgtctggtcccagtcggtcgcagagaggaagaccagcggggtcggcacctcgcgggaagcctgcaggcgggacggtcaagatcagaggtgatgacgtctctctcgcgcagcggatggctgacgcgatggacggaccgagggactcggctggcggaccatgaagcgctttacgtgcgacgtcgtcgaggccgaccggccgagcatgctcgccgcaaagaggccaatgccagaggcggcgactgcgatgaagagcaaagggcgatcagctggctgatctgcgcgcgacggaacaggtgatgcttccctggctgccgaccggtgtagcttcagtcaggacgcacgggccgggcgcagtgcgcttcgcatctgagcagagaagaggtgaggtccgagcatcttgcggctgccaatgatcggtatgggagggcggaagggaaggggagatgtagacggactgaccggtgcgagcagggcgggctgaaggtcacgaagctcggcccagcctgacctggcgaccctgaacggccacgacctccccttccctccgacaccggtctgctctactttccgttcgcagatcaagcaggagaccgtcttcgacgccgacagctcgcgcacgtccagctctagtgaccatgtcgctctcggccgaccaacaggaggcgttcgatcggctcctcgccatcacagcctcggcctcggccgccgcccaggagcgcgacctagcgatcctttccgagacgaactgggatgtgcaggtgagtattttaccattgacgaccgtctccagtcaggacgggccgacagggaacgggaatatgccaacctgacaaccgaggcgcaggggagtaaggtggccggaggataagctggcaacggacttgacgccctcgcaacctcttgaagagcgtggtggtcgtctgaacgccccatcgccaactctttggctgactgtctgccttcccatgtcgaacaggccgcactagaggtcatcttctcgggtcaggctgaagaggcgtcgtcgaacccaacggcgtcgtcctcgttggctcgagcggccgacgcgccggccacgtcctcatccaccggcgcaagctcgccgacaacggccagtcgatgctcgtcacgatccatcagccgtcggccctcctctttgaccagtttgaccggctcctcctgctcgccaagggcggccacactgtgtgcgtccccctgtcgctccggttcggtgcctcagacttgcgcgcaagctgacaatctcctcatcccgctgtctgcagctactttggcgagctcggcgagaacggtgccgacatgaaggactactttgcgcgcaacggcgtcaaggccaaggaggacgacaacccggccgagttcatgattgacgtcgtctcgggctcgctctcgaagggcaaggactgggccaaggtgcgctccggcttcctccccagccagctctgtcctcacttgctgactcgagtcttgcgcccggcaggtctggctcgagtcgcccgagtacaaagctgtcaaccaagaggtcgacgacctcatcagcgagtgcgccaacaagccgccgtcgttcgaggaggacggcaagacatacgcgaccccgatggcaacccagttcaagctcgtcgtcggccggtcgtgcaagtctatgtaccgcagtacagagtatgttcagagcaagatcggcctccatgtcggctcggccctcctcaacggtctctcgttcctccagctcgacaactcggtcatctcgctccagaaccggctcttctcggtcttccagggcatggtgcgttctgttcttgctcgtcggccctgcctaaaccgccagctgatcgcgtctcctcgcccggcagttcatcgcccccggagtctttgcccagatccagcccaagtttatccactcgcgcatgctcttcgaggcccgcgagggcccgtcgaagatgttccattggctgccgttcgtcgtcggcgagatcatcggcgagctgccgtacatgatcgtctcgggcgcgctctattacgtcatctggtgcgtgctacggtctcggtcgccttctctccactctcgcccgatggctgacatgctccctcctcctctccttcaaaaaggtacttcatcgtcttccccgtcggcatctcgaccaacccgcagcatgccggtccaatgtttgccatgattgtcctctaccagttctggacggttggcttcgcctatgccgtcgccgcctgtgtccagaacgagcagcaggccgccctcatcaacccgagtacgtccttcttcttctaccgaccctcgcgaacgccaaccgactgacgtcttgccctccctcgcacagtctttctcggtatctttgcctcgttctcgggcgtcctcgtcccgtacgcccagatcaccgccttctggcgctactggctctactacctcaacccctggacgtacatcctcggcgccgagacctttttcgcgatgcgcaacatccccgtcatctgcgccgacgacgagtacgcccgcttcccgccgccggccggccagacgtgcgaggcctacatggcgccctatgtcgcccaggcgccgggctacctcctcgacccctcgagcacgaccgagtgcgcctactgccaggtacgtctcggaaacaccgtccttacgcttccggtccctctcgctgacctcgctgcctcttccagtactcgagcggaaacgactacctgcgcaacgtcaacctcgacaaccgcgtcgtcggcggccgcaacattgtgcgtcctccccaatccacgcgcgtccgctcagccgatcgaccgctgaccctccctccctttctctccagggcatcaccatcctctacacggtcgccttctttgcccttgtcttcatcctcatgtggcgccgctcgcggcccaagagcacggcggccaagaagtaaatcgcttcttctctccctttcttttcttgaggcagggaggaggggggtcgcctccctgcctcaagcgagctttgcgatctcatccgccagcccgcccgagtggacgacagcgtcaagcacctcgtgctgtaaaatcgtctcttcccagggcatgcgcggctcctcggtccgaccgtcccggagcgagcgggcgacggcgtcggcctgccaggccatgcctcggccgtggttcggcgtaatcgggtggtggaacgtctggggctcgtcgggcttgtcaaagaggaggacggtgaaggacgacgggtagggcgaggcgccgtgaagggctgcaacagagacacgagtgtacgcgtcagaaaggtcagcccaggcgcagcgagcgataatctggcatacagcggagagggaagagaccgcactaagcgtgcccttggtgccggtgacgacgatcgaattggacgccgtgggcgtgtcgagcgagaccgagacggtcgcctgggcgccgagcttaggatacgtcatgacagctgtggtcgaggcatcgacgcccgtgcgcttgtcgaaacgaaccgaggcctatcgtgcagaggcaatgtgcgtcagcggttatctaccgactcatcacgaggagcaggtgggcgaaggcagaccttgacgtcttccggcgggcaccgctcgttcgccgggtgctgaaagaggaagagcgtcggccagagcgccgcgtacggcccgaggtcaaacagcgccccgcctgcgagctttgggttgagcatccgatgctcgaccggcaggtcgccgaagtccttgtcgaagcgcgagtcgatgcgcttgatctggccgagcgtgccgtcaaagacgacggcctgggcgggggcgacgatcggctggaagcgcgtccagacggctgaggaagtccgaggagaggatgtcgagaattagctcattcaaggcgcaacagacacgtcgaaagcccagggcccgaccttccatcagaaagagacccctcgccctcgccaactcgacgagctccgtcgcctgggcggccgtcaagacaaacggctgcgacgcaagctccaagtcagctgtcgggaccagttggtcccagtacgctctgcaagtcgcaccttctcgcacaggacatgcttgccggcctcgagcgcgtccttgacgttggcaaagtgctgcggatggggcgtcgcgacgtagacctgcagcggttgccgaaagtgtcagctccttcgggtcgagaggagcactgcgctcgatgaaaactgtcggtacgaacgacgtcaacatcctgcggacatggcccagaggggaaagaattttggatcagcctggctggatctcgcatgggccgcctctcggtcgacgtagcagcagccgcgaccgagctgacctcatcctggtacagctcttcgtagcttccatacggcctgatgcccccttcccgtgcaccagaatgccgtttcttatagtacttggtgtcggctatgaacgcctcggccttcgagaggctgcgggaggcgacggccgagagcgagtgggtgacgtcggtcacgccccggcttgtcggagggttcatgcagaccgcagatgtcagtcggatgggacgcgggcgagcttctcgttagtggtctacaaaaggcgtactcggtcgggtcaagcaagaggtcctaagaggggagcaggttcaggccatcgcaagtatagctggtcagcctctcgctcagctccgagctcgatcgtgccgggactcggacagacgtcgaggaagcgctttgcgattccgccgaggccgacgacgccccatcggacattgtatgctggcatgataggaccggagttggagatgtgaatggggggggatggggggaggttggtaaggaaggagcccccctcgcggtagatcaagcgcaacgcgcgctgcgtcgagattgactgctggccggacgccgacctcggcccgccgcacgtcaaagtcacgcatggctttaccctcacctcgcgcgtcccgatcgccgacatcctctcgacgatccggacggctttcgacgaggccgggtcggacctacccgtcgtcctctcactcgagaaccatacgaaggacgacggctttcagcaggggctcgttgatgcgctgcatgcggcgctcggcggggcgctcgtcgaggatgagcaggaggagtggacctcaagaggctcggcgccgacgcttgaggacttcaagggcaagatcttctgcatggtcgagtaccacggatcgacggagaaagtcgaggaggacgcggcctcatcctcgtcgtcatcggacgatgagtccgacgacgaagcgacaaagcagcagcgccaggcgaaaaaggcggccaagggcgtcattgggcctgcgctcgcccggctcggcttctacgcgtcgagcatcaagccggcaaagggcgacggttggctctttgcgggtgcgtcctcgtccattggcactcgtcgacacggccgatgaaattgcattgcttcgccttaacagagcgcgcagcgacgcccgtcaaccctctcctcaacgtcgaagagtcccgcctcatcggccacatcacccagcacccctcgtccgtcatcgaccgcacgcggaccgccctcctccgcgtctacccaaaagggctccgcgtgctctcgcacaacctcgacccgctcggaccctggcggcacggcgcgcaggtcgtcgcgcttaatttccagaggtttgaccggccgctgcagttgaatgaggcgatgtttgtggggagcggggggtgggttctcaagccagtccatttgagggagggaactagagaggaggtgctcgctaagaggccgaggatgagggttcaggtcaggctcggcgccatcagcggccgtgagtcctggcgagccgtctcttcatcccacgaattgctgaccccgaccctttgcgcgaccgaaccgccagtcggcacgctcgccccgcgcgcccgcaagccctactgcgaagtcaagctctatcactcgcaccagcgcttcaaagcgcgctcggcgacgctcgccgtcggccccggcgaggacggcggggtgtgggacaagctcctcggcgggccgtgggacgtcgaggacgacgagctcgtctttgtccggtgcgtgcgggctcggggtccgggctcgtcgcctactcactcgacgactgacgcgggcgctcgcatctgagataagggtctgcatcttcgacgacattcggcttaaggaagacccgctcctcggcgtcttcaccgcgcggctcgcttacattccgacctctggtgcgtctctgcctactcattcctgtcggtcctttgggaggcgagcccgctgataccctccacttaactgcatcttgtcgtgccaccccccccccccggtcttcccttgaacgctcgctcggtcctggacccgcaatcaaaggctggggcctcgtccgtccgctcgacgcaaacggcctcgagacaacgctcgtgctcgccctccagatccggcaggagcgggtcgatgatagctgaggggggcgctgctgagggcctctaggctgggatctacggagggcgacgtccgcgcgcgagagagagagggagcgaacgcaaaaggggtcgtccatctatgagacgttctcaagcgagagattgcaagggggcgctgctaaatgcgcagcccgccaatctcacgctcctccctcctaaacagcacgtcgtccccccctccgacgtggggttagttggctagagaggagggctagatagggagcgagcgaggaggccggcgggcagtccggcgcgcgtaggagtcgttggaagaggctcgacggagttgggcatgcaaggacgagctctgcgagtccgggtcgacgagtgcaaggatgggaccggacgaggggcaaagggcgaagcgcagcgattccccttgcgtccatcacctctcgcacgcccttctcccccattctcttcagcggccaaaggcagccatttgagaagaaaactcacccccgacctcggccctaaacgcctcgaagctctttcttgtaaagcggtcggtgatccgccggttcgtaaagcgataggtgacgtatgcgtcggggtaggcgtgcaggacggcttgctgcatcgtcagctggcgggggtaggccaggagggcaagaggttgattagcttgagcgacttggttgctgtcagagaatgggatcccttgagtcaaggaagagagggaacgagcgagcgagcgagagcgagatcgaagactatcaacgtgtcggtcgacctctcctcagcccagccgagctctcgagcatcgccaccctcaccctctcacccgaccgcacccgatctcactctaaacgcaccttgtaaaggtccgtgtcgagcaacgacatcttgcgctgagagagagagagagagagggagagaggaagggtgtatgcggtgcggtgcaggcaggacgaagggtgaacgaacgtcaagagcgaaggggaggctggctgactcgaccgactgactgactgactgaccgacctggcgatggtcccttgcaactctcgaccggaccctgcttgacctgcttgcctgcctgcctgcttgccttcttgctatcctctgcctcgtgctctgctctgccgtctctctgccctcgctcgcctgccagccatcttgcttgctgctgtgcttgctgcgcccgacccttttcttttctttctcttccttcgacccccctcccccccggctcgcccgagtcttccctcctctcgctctcgcagctccgaccaacaccagcccaacagcatacaatgtcggacccctcgctgctctctaaatccaaagacgccatcctcgacgccctggcccagtcgaccgaggcgctcggcatcaaccctaaggccccgacgcccgctcctccggcgcttggcgcgaccgagcagcagcagccgcaggcgaacgacgagggtcaggcaaagaaggagccggcgtacgtcgacgagtcgcttacggctgagcagctcgcggtccgccctccgccagacggctcgcaagaagcgccgttcccctctgccatcgccgcgctcgtgtcgctcggcctctcgaccccgctcctcgtcaagaagtccggcgccgactcaacctccgcctttgagcccatcacgtcgtccggcctcaagaaagcgtcgaagcttgcgtcggccgagctcaagaagcggtcgaagcttgaggccgggagggaggaggctgaggagaaggctaaagtggccgaggagcgtgagcgcaagaagcgcgaggaggcaagcgaggtcgtcctcgtcgaggatcagagtctgccgaaagccgtcaaggtgcgttgtggcggcttcgttttccttttgctctgggctgctggggagacgggcgggaggagaggagagagaagggctggggcttggacacgcccctctctttcttcgctagcgggcgtgccaaccggtcggctggtgtcaggtcgaccggacggccactctgctctgagcccaccggcctgcccgccggcctcctcgctcgctccctatctagccctcctctctagccaactaaccccgctcaatcaccccaccctggcttcctcaatcggcggcggcggcgaggagccagccatggacgagttggccttcggtcggctcctctccgccgccgccgattgaggaagccagggtggggtgattgagcgagacgccgctccggagccactcgccccggaccgccgaccagacgcgccagacgtcgtcccactcgcgcttcccggcaccggccgcgctaagcgggcacgcacagaggtaaccgacgatgccggatgaacagacgacgtcgaacgtcgtcagcgacgctcctggctcgagcgccgggccaagagggtaggccgcaagcggcggcggcgtccctggcgagccctccctcaacgtgctcgacagcagacgacagagcgcccgaaaggcgccctcggcaagccgctcgctctcgcgcaggccctcctcggcacctgcgagccccgcacggcgcacgtcgccaatgtgttcgaggactttgtcgagtgcggccgtgaagctggcgaggtcggcggtgtcggatgagagggaggacgggggcgagaggagccggacggaagaggtctgcgaggcggcgcggtgcgagcggacggaggagaggcttgcgagcgtcttgtcgatgtctggctcgtgcgagtgaagaggagaggttgtcagcgggagagatggagggaagggaggggggggaaggacgcgctcgactgaaggcgcgtcgtcgcttgcgtcgactggtgcaaaggcaagattgtccgctcgagccggttcaggcgggtgtcaaaatgggcgaggatgcctgggcgcatacaaagcagggcagggcaggagcaaggtcagctcggacgggttgcgagccaggagggccgaggagggatggaccggtcatgcgcgacgcgagctggtgcgtctttgcgaggttgcggtcgagctggcaggcgggagggcaagacgggaggtcagctctcaaggggacagcgaggatgctcataaggcataaggacagaggacggacgagctcgatctgagcctttgcctcggagacgtcggccatggcgggctgatggttggagtcgagccaacgttcggctctagcagccatccccagccatgctgcccttctcgtcgctggccgtcgtcctccttggcctcggatgccatgcgagcgcagagaagcgtacgtagaagagcaaatcacaaagaccgacacgctgacccgtcttgctctcgacgggcagccctgaccggccgctttatccagtcggtccctctgatccgagcacctccgcggcctcctcctgccctatacgacccagcatctgacctccctttcccaccttcttgcggcagcatcaccgacatccaccctgacaagcactacacgcccggctcggccgtcggccaaggctgccacaagccggccgacgctgaccccccctcgctgtcctcgttcgagcaactgggcgtcgatccggacgacccgaggcgggctggcaggtggggaactgggccgtcgtgcgttctcttttgctcttgctccttgtctgtcctttcgaggggctcggtcgacatactccgtgcgagagcgtgcgacgtctccaccgactttctcgttttcgactgacgcctctctcttgcttgggctgccctgtcgatgaccccccctaccctggacccgacagcgactgcgactcgcccgtctcgctcatgaacctgacgtttgactggctcgctgccaactgggccgacgaggtcgactttgtcatctgtcggtcacccctcgcccactcgctgagccctgctcggaccgggctgacgagcgtgtgcgccctccctctctctacacccccccctcccgctcgcctcgactcgctccagcttcgtcttcaacttcatcggcttcatgatcgccgccctcatcaacgtctggatcacccaaaagctcggctttggaaaagtccttctgctttcccccccgcttcccttcctcccttcccctccgagactgaccgctttgctcgtgcttcaggtcatctgtatagggagtgccttacaggcgcttgcgtattgcttgcagagctgggcaccgccttatggggtcttttgtctcgcccaggtgttcaatggcgcagggctcggactgcaggacgcgcaggtccgttcaagctggccgccagtggtcgtcgttctctcactccttctcgttctctcactccttctcaacaaacccgctgaccctctcctcgccttttgacgaccgacgatccccctctccttgccccccttccctttcgaaccgacgaccgacgaccgaccgaccgacacgccaggccaacacatttgtcgctcacctgcccaacatgatgaacaagatgtcgatcctccacgccgtctatggcgttggcgcgctcgtctgcccgctcgtcgccacccaatttgcgacgctcgagcactggagctaccagtacttgacgtcccttggcttggcgctcttcgtgcgtttgccttcttcttctctctctgcgcgcgggcgcgaccgcaaaactcttgacgcttgaggaaaccggcggctcttcctgacctgagtgactggatctctttttttttttttttggtgatcacagaccttctcatccctcgcttacgtcttccgcttcaggaccgaagagtcgctccttggccggcacccggacgagatccccgcaaccctctcttccgagaccgaggccggtagggggacgccagcgtcgtcgtcgtcggccggcgagcctgcccgccagccgacgctctgggacatcctccacagcccaaaggtccacctctatgcgttctggatcctcatctatgtcgggctcgaggtgacgatcggggggtggatcgtctcgtacatcgtccaggtccggaacggtacgtccccccccccttttctgctttgcgaactgacttgggtctctcgctgactatcatcatccgatccgttggctgtgcttgatcactcaggcgggccctcagccggctacacctcgtccggcttcttcggcggcctcaccgtcggccgcatcatctttatcccgctgacgaaacggctcggcgagaacctctcgatctacgtctacacgctcgccgcgctcgcgctcgagctcgtcgtctggtttgtaccctcgctcgtcggcaatgccgtcgccgtctcgtttgtcggcgtctttatcggcccgcattatccaatcgtcgtcagtgcggtcacaaaggtgattccgaggtcgcatgccggcggcgccatcggctggatcggtccgtccttcctccttcttctctccttctctctcttgctgtacccctccttcccgcggtcttgctcgagagttgacagaatgggcttcttctcggcccgcctgcgcgtatgcagcctcgttcggccaagccggctccgccgtcttccccttcatcgtcggcgccatcgcccagaagcatggcctcgaggttccgtcccctccgtcgcgtcgcccttctaaattccttgcgtccgctgctgacctgcgcgcgacccctcggaacctgtgctccgctctgcctgcaggccctcaacccggtcgtcacggcgatgatcggcctcctactcgcgctctggatcctcgcgcccaaagtgcccaagaagaacgactaagaggccgcattccatcggggggaaaagggccaaaggggggaaagaaggacgaacgacgaccgaggtcgaaccgccctggttgatcgtcaggtagtacggggcaacaccaccggaccacgactgttcgggtggagagggggagagaacggcaggtgcgtcagcgagttgaaggaaggtaagcgagaaggcgcggcgcgcgagctggacgcggtgaaaagacacgcacgaggagggtcggctggcagaaggtcggggccgagggggtgttgacgctgtgtcaaggcagatggatggaaagaaggaggtggtcagcagagggcaggagagacggcgttcgtcgccaccaccagccagcagcgggagggaagggctcggcagagggtctgggcggggtgacgagcgagccaaggagatgcgaacgaggtggcgggcgagcgagatgggcagatgggaaggacgggactgacaccgggggcgactgggcaaaggcgaggggcgcaagagcgagcgaggcaagggcggcgacgagcatggctgctgagtaagaagagagagggagagggtgggaagcgggagaatggtggtcggagggggagagggaaggaagccaggccagccgcaggcgaaaagcgcccagcaggctcgtccgcagcagcccacccaccgcaggacgacccccgcactctccacagcccctctctctcgcccatcgcgaccctctgccatcaagcgagcgagtccgcattctggcaacctcttgaggaggctctctgtggcctctcttatctcttaagagaccgcaagagcaacaagctgagaccgaactgatgcccacagttcaagctttcgactcgcccgccgcctgtcaccgatgacatgccttgacttgactcgctcccacctcttgactgcgcggccaaacgacgatgtacgacgactgctcgctggctcgacaccttacgtcgacccgcaggtgggttcgggcagactggcgggcgggcgtcgcgaaggacgagtgttcgagagactaccaacggagtcgcggtacggtcggggtgcggtccgcgctttcgtgaaaacgctaagttcgggcgggcgagaggcggggtcaaaaggttgagttcagttgaagaaacgaacgcgcccttcgcttctcaatccatccatcgaacgacagacaagtgacgaagggcagacagcatcaagacgaagccggcgatggtgtcggcggcagcagcggcggtgggggtggtggtggtggtgtcgactccgcagcagccgtcgtcccgcctcccacctgcccccctcctccgtccacctcctctgccgtcggaaacacctctccaaaccacgaaggcagcttaccgacgttccctcctgcccttttcagcacaaagtccctcaagccgaccttgatgcccttcccgtccggcctctcaacaatctccttgagctgcgcgcgagggagttggaggagggcgccgtacgaggcgagacccatgacgcgcgcggctcggatgaacccttcccagagctggggctgaagccagacttttttcgtgatgagccgcgagaggagcgaggtcgagacaaaggggacgagcgatttgtacgtctggacggatttgatcacctgccgttcgagccgaagggagaggttcagctgggcgaatgcaaggtggtttatgagcgggaggagagggaaggcaaagggtacggaccgtccggaggaagagggtcgggagctcgggttcatcggcaatctgctgcatgacggctgcaagcacgtccgacttgaagacgtccgtcatcgaaaagcaaatgtcgatcgctgcgaaatcgggaaggaagggggggaagggggctcgagcgtcggcgacggggagggcgaaggagggaggggatagagggaggtcgaactcgagggcggcccgtcttaacagggagcggcgagaggcaggttggcgtcggaggagcgacttttccgtccgtccagggcgggcttccttttgcctagtggttgtttgagcgaaggagctgcccgtccctctggtgtcaggggaaggcagccgggccgcctcgtgtggtcggcagccggtcggcggcggatttggtcgctgaggcgagcgggtcaaggggagcgagcgggaggcgagccctccgggggatgatgggtccgggcccacaaagcgtccgctcgacagcgtgatgggctggcattcgaaggccggcgagggggggatccggacgacggggttagtctgctgggtcagcagcgtggtcgggcggcgagagccggctggctggctgtcgagcgcgctcgggcgggcagctgagacttttttctttggctggaggaaaaggggccggcccacttggcaggtcgaggccggcccggtccgagctggtcagcggcggcgactggtggttcggaggcatgacgcgtggcggccacgcctcgggtcattctttccagtggtggagctcgttttcgccttcgaagccaccaaagagctcggaccaaagctctccctccccttctttcgccaactgaacacggtctcagagccgagcgaggtttcgggtcgggccgacggccagctctcgacgcgtacccaagaaagggtccgtccggagaaagcgcgagcgcgcgacgccttctcgccagggcctgtcgccagggcctgtcgccagcaggtcgccaaggcaggtgcttggcagtgcagttctcatcgtgcaaggccctcagccactcgctcagctcgagtcgagaccctgtcgacaggcgggctcgcgggccaggaagagaggaggaccacggctcgggcttaggttatgctacgctagcaagtgtcctcgctcgtgctaggaggaggcaagcagcaagcaacagctcaacggctgcgggaagcccagcagcgggtcatcgacagctccacagaagtgcgctttgacgccgagcgtctggccgacagcgccgcctgcccctgcaacgccctgcctgcagcgtgcgccagagaagtctccgattatgaagggacggagaccccaggctgcctcaccgctcgctcaggtgggttctggctaccgcctgaaaccgcagagcacgcgcttccccccctccctttgaccctgcctcgcgcgagcgcctgtctgtgacgcgagtacgaagaggcggaagctggtctccgctgcaacctttcatcctgacactaccccagcgagcgctgacgtcgacagtcgagggggaggagggacgggcgctggtgcgcgaccttttgcttgccccaccgggagctgtcgatgagcagacgcacgctgcgtgctgctggctggcgtgaaaaggaggagggcgcggtgcggcggccgctgcgagacaaggcccttacccctcttacacaagcaaagcacccagacggacgacgtgcctgacctcttaggaggcgcgcacgtccctgactaccctgcccaccgccgcacgaaaccctggtttcggacgcgcccaaaggccgggcggtgctggtttgctccctcagcgctgacactcgcccgctcaagccctcggcacctttggtatggtggaggcggtagcagcatgctgactagcgcagctaaaaggtcttcatcgacaaaggctggcaaggaggaggagcaggcagcggcagcagagggagctcgcccgcccccagccaagccgagcgcgtacctgcaggcggcgagctgtcgagagggtattacagagtcagcagcaggaacggaccaagaatagggcagagagacgcgcagcacgagagcaagagccgacgctggactggccgagccgggcgggacagggggatggatggcacgggtcgctgcgcttgggcgggctcgactgagcgcgaccttcgcttctgtcctcccaaccaccaccttgcttgctcgcctttcctgactctgcccgcccgccctcgagtcgagctcccctcgtttccttaggtgcgtcttctctttcttgcatcgagctggcatggatcggaggaagagtgcgaaagcctcgaccgaagcccgctggccggctcgatctctcctttgcgtctgactctgctgaccttgcgccttctcctgctcatccaagcttccgccgtccgccgcctgtcttcccctcggagcagcaagctcacgctcgacctcatccagccctgctggctgctcgagacgccggcggcccacctgccgcaactcgtccggtcggtccggtcgctcaagacgaacgagttgaccgttgccctctgcctggtcgaggacacggtctttgtccgcccgcgccggcgcttcgacgacctcgacctccacttcgacggctgcggccagaagcccagggacgggcccggcggggtgagtgcctacacaacctccttctccgagccgcgccacgagccgacatcccacctccttccccgccgacaggccgtgctccgcggtatcgtttcagttgtgtcgacctcgcgccggatggtcgacgacgtctgcctcgtgctcaaggccgagaggcggctcgcgctccaaggcgggccgcccgagccgtgccgttgccttcgagcggtcgctctcgctcgccgacgtcgccggcctcgagcagatccagctcgtcaagggcgtcaacacgtgcgtcgccgtctcgcctgtcgcctccctgccatccaaggagtcggaaactgaccggaccggctcctctcttcctgcagcttcgagttcagcctgcgcgtgcccaacagctgccccgcgtcggtcgcgccgagcccgtttggcggcctgcgccacatcctgagcgcccacgtcgtcggctcgggtagcccgctcaaggccgacctcgtcgctaacaaagacgtctgcgtcattcacctgccggaccggatcgacggcccaggtgcgccctcttggtcccttcgcagactgctccttgcaaacccgaagactgacacgcccttacccttccctcttcagatctctcgttcgaggacgaggtcagcagcgacctgccgtggtcggcccccccagcggctccaaatcagcgccgaggccctgacaatcggcgaccggcgactgggtcatcctccatctctcgatcccttgccctgccaacgacgtcaccatctacggcgcccggtcccacgtctgccagacgatccggacgcggttggcctcgtcaggagacgatacggagcagacggtcgccggcccgaagcgggcgctcttcacaagggctacccccccaccccctcccctacactcgactgcacagctacaagtatctcgtccggagcaaagccgccggcggctcgatcgcgagcgagtttggcagcacggccgacggcaagcaggcctttacgcacaagcccgtcccgctcgacacggtggtcccgtactattgatgcgcctcgtgccaggttgcggtgagacgggggaataagttggttgcgatagagggagcaaatggggctgcaggggaggggggaggggaacgtgcgatagagcgaggaaggtctgcgagtttaggcggtacagtagggtaaggaggcgaacgggggccgtgtgaaaggctcaacaacaggggtggaacaggcgggtaggcggggggatcgtagggtaagaggctgcgtcaggtaaggtaaggcataacgggtgggaggaacgaaaagcagcgagcgagtttcgattaggggttttgcagaaaacgagggtgtgcgagagggagcgaagtgaggaatgtgtgtgtgtgctagtgtgtgtgtgtgtgcgtgtgtgaaaagcagaggcttgaaagcaaagatcagaacggagggaaggggaggtggtggtgccagcctctcttccttcagcggagagggaccggccgccgcgagccgttgatggcggacccgaagggcgggccgagcaggccgagcatccgttcgtcggctccacagcgccgctcgaccgtccccgcccccgccgctgacgaccaggctgggtcgaagagggtggaggagaggtcggacgcggggaggagatgccgccagaggacgtttgcgcctcgctcgagctcggccggcggcggtgggggaagcagcagcaaagctggactgggcgagcgaaacgacgacgacgacgacgaacggctggtgcttgacgacgacgggacgggcgagagcgggagcgggagcgaggacgaaggaatgctcttgcggcgcccgtcgtcggccgtcgaagcaatataccgctctgcagcggccgggctcggcgaaaagcgttgagcgccagcaggggccgagccggccatggacgacgacccgcccggcgcccgcgctgccgccgaggctggactcggccggaggtccgcctgcgcctgcccgcccgggctgtagagccgctcgcgggcctcaaccgccccctgatggaacacgaaccgatggccattcgccccccttcgccgctgctgccgcccaccgcccggcccggcggacgaggctgccgagcactcgtcgcagggcgagaggatgtggtatcctatacgtgcaccgcacgagaggcagccgagcgaggtggtcgtgcagcggcatgttgtccggcctgatgagccttcgccgtcggcgtcagacgagcgggggagggcgccggtggagaacggagggtagtcagtcgagtagagggtgatgtccggcctttccaaaccgagtgcaacagagtcagcaggggatgccagcgaggtgcgggaaggttaggacggaccggaggaggaggacggcgcgcatcccgcgcgaggagaggagtgagtcacaaccgcggcagaggatctcgtagactttgtggtcggccgctgccgacgacgacgacggggggcgcgagtgagggcgcgaggggggctggctgggcggcgagggctgccgttcctgctgctggtggccgctcgtgtgctgctgctgctgcgccccctcccccggccgggcgtagaaccgcgccggctcgaggtacgtcctcgtgaacggcccggggggcgcgagccggcgggtcgggaacggctggatggtatggtctgcaatcgacatgctcaggcgctcgatttcgacgaccttctcctccgggccttgcaactgttcaagatgtacggcaaccgggtgctcggacggacgctgaatgttggcgagcacccggttgccgtacatcttgaacagttgcaaggcccggaggagaaggtcgtcgaaatcgagcgcctgagcattggccagcccctcctcgtaccgctcgtagaactgccagcgggcatcaaagagaggtcagctcttccctcggccgctagacgacgaatttgctgcaggacgcacgtcagcgacgatgagcggcagctcatcggcgtcggagccagtctcgttcgccgccgcaatcgtccgaaggtcgtccggcgtctggttattggccttggccttggagatctggccctggacccagcgcgccggctgcttgatcttgccctcgctcgcctggccgaaccgggcgagctccggctgcaccagggccttgatctgctttaggcagtcgtcctggtcctgaatgacaaacttggctggcaggccgacgagagcgtgatacggccgcaggtagctaagcagcgaggacgatcaaaaagagcagcaggtgagcactcgtatgcgagagcgagccacgatgccagggagccgacgcaccggacgcagacgctgtgaaacgtgccgaggacgagcttctccgtccgctcgggcccgataaagcgctcgagccgcgtcttcatctcggccgccgccttgttggtaaaggtgaccgagacaatatccttgggcgcgacgtcgtgctcatcgatcaggtgggcgatccgtgaggcgacgacacgcgtcttgcctggccgcgcgcagcatgggcagagagggataggtgttgacgtggtcgtcagcatcatgagcgtggcagttgtccgggcatctagccgatagcaagggaggctcgtacctgatcctggaccagcgaggatctggagcgggatgacagggtcatggacgacggctgaggacgggccgcgagagggtcagcgagctgtcggtcagggccgtggcggcaagagacaggccgagcaggcaaccgggggtgacggtcgagctagcgaactcaccttcatactgctgcgggttcagcccgcggaggtactgctccgtatcgatcgattcgagcatgtcaggcaagcggcgaggtgtcgaggtcggagcggccgacgcaatagcgacgaggcgacgggcgtcggtgacgtggctggcgggcgagggccgagctgtcacgctctgagctcgagccacgagaagtcgtgacagggacgaggatgcccgcctgacagcccctgaaatccgactggtcgacaggatcgagccgagccgaagggagcttcgaaagggctcgagggaaggcgacgccggcgatggaggacgactggtccggtcttgctgcgagctgcggtgacagtggaggctgacggattgggcgggcgggctggtcctgaaggtgcgagcgtgcagtgctggtgccgactgggccgtgaaggtctagaggaagggtgacgagaagaagactggctcaacaggctggactggtcgaaggtgaacgggagagccgcggcgcgacagcatcatcgaggtcgacgacgactatccaggtaaagaggtcccagttgggggtttccaaagtgtgagcgagatcttatcggatcgagctcaagccttacccactggaagcagacgacggcgtccagttttaaatctgccgcctgattgaggggtcgatgaggcggttcgggtggaatcgaccggggaagggtgggtgacgcctgcgggggtcgcttaccgagtacgcgtgtgtcttgaaggcggaggacgggctgacggttgggtgagcaggagcgacgggagccgagggccgagcgaaagagacgagacggcgcgcctgctttcgtccccttgccggccaacacccatctcttcctgcccaccttcgctccgcctttcatggagcgtgctaacgtccgcttcggcagcccgctcgcatgtgaagccgaatccgcgatgtccgaggacgtcgattcgagccttgaggacgacggtgtcggcgaggagcccggcaaggtctgtcctcccgccgccggcctcaccctcaagcccctcctctcctcaggcctcagcgagaaggagaagctgcaagttcgagagctgagcagggctgacagcaagagctgcgacacttcactagaccacgctcctcttctactcgcatcgctcgtcgctcgcagccgcctacctcacgccgccggccgagggtgccgtcctgcacgtgatggccgagacgtcgtcggcctctgacatggccaaactcggttcgttgagccagcgagatctgccacgcagctgagccccccgacctggatgatgacgacgaccctctcgcagtgctggaccagatcgacccggacgtcatcgtcgtcaactcgggtgcggccgaccagctggtcgaggtcctgcaggcgcgctgtcggttccgcttctcgagctgcctgcaagttctggcccaaaagaacactgacgagcgtcagcttcccaggcagctcgcacgactgctcgctcgagatccggccagactctggtgcgccgtcgtcggcggtcctcctgtcctcgactacccgactgacgcgcatacaccctgcttctcgccatcgcagactttaagtaccccaaatgcaaagcgaacatcctctcgcttcagctcccggcaccgtcagctgtcgaaggagatcgatggctatcggaaggctcgccgagcagggcctcgcatgacgcgtacggccgccggcgggtcggctcgcagatcgatggcgagggcgacgaagaagatgaggacgcgttgttccgcaaagagatgcgcctgagcgggatgctcgactttgaccagacgtacgcggtgcgtatcgtgcctcacgactccatatggctagcaggcaggcaggctgactcctcttgcgcacaggtctgcgcggccggcgggctcgtcggcttcctggcaaaggccaaggcgcggggagagcttcgaggctttgacgaagagggaggacttcgcgttggcggcatcgtcaccttcacgccgtgcgtcctgcttgcgcattgctcggcttgcacaagggctgactgattgccgatgcctcgacaggcacgaacacatgctcatttcggccgaaacgctttcgtgcgcgccctccagctcgtgatggtcgacaccatcgctgacctcccaaacaggactctcggcgtcttcaccttcgagtcgcacgcatacacccactcggcggcgcagcagaagcagggtctctcgctcgccgctctggtaagctgctcgcaacgtccaactctcctctgcctgactgacagcctaatcctcgccccctcaggcactcgccctcgcctgtgcaaagcgacgtcatcgtccaggtcctctccttcatctcgcccctactggcctctgcccagccgacgtcggcccacgggctccccatcttcctccccgttctctcgacccttctcgcctcgccctcgacgagggcaatcgtgacggactcttcgtcgccgccaatcctgaccggcctcgcgcaggtgctcaagtcgtgcgccggctcggcaacggagcgggttggggcggcgggaggaggtgcggtcgccctcggcggcggaaacagtaacggcaacacgcagaatgcctactggacgggcttttgctggtgggagctcagcttcgacccagcatttgctgccgtcatggacaagtgcgtcgagtggcgtccttgatgttagcgtgcgcgcgctgacccgccccgcaggaagtacgacctgctgccgtcgttcctcctgctcgcgcggacatcacccaagcagaaggtcctccgcatcatcatggccacactggccaacctgatccggctcgcacccgaggtcaacacgccggcgctcctcgccgcgggcggcctgacgtttgtcaacggactcgagaagggcggcaagggcgtccggggcgacgacgaggagcttgtcgccgacctcgagtttgtcacggaagctctgaaggagcgggcccagacattgtcgtcagtgctcccgttccttgtcgtcgacgacctcagctgacttggctcttctcgtaggacgtgggacgagtacgagtcggaactcgagacgggccacctcaagtggagcccggcacacgagagcgaggagttctggaaggagaatgccgtcaagctttcagagcgcgacggccggctcgtccggtgcgtgcgacggagcgagctgcggttgggcccttgtcgcgcctcgactgacgcccttccctcctcgccactcgcagcatgctcgtcgacatcttaaaggagtcaaaggacgagacggtgctggcagtcgcctgtgccgacatcggtcactacgtcggccatttcgagtcgggcaagaagtgagcgccgtctttggagctggattcgatcatcggctgacattacttaccccccccccctcttccaggctcgttaacgccctcggcgccaagacgcgagtgatggagctgatgacgcacccgaactcggacgtgcgctaccgggcgctgatggcggtgcgttgggtcgtctgactccgtccgacgtcttgtgcgctggctgacatgtccttttcgtcgaccctcaggtccagcgcttgatcagcttctcgtagccggctgcgacggcgcctgcgcgcactcgacgattcatgaacgtctcagactgtcgaccgcgggttgcgcagcctcaaagctttacaggaaggccgactactcgagcgcagcgctgtccgatcgtctgaccacggcagccgagagaatggctcaactgtgctgcgctgcacgggggaggggatcgacggtcggccagcacgcggcgggcgagagcggcgagagagcgagaggagaagggagggagcaagtcgaggagagagggaaggaggagaggacggacagtagacggtttgacgggccagccggacacgagtagggtgcaagaggaggaggtcgtcgtcgtcgccgctcgctcgagccgaaacaacgcccttcttcccttcccgcccggctggacgccctctcaaaggctgtctcggcgggattcaggctatccggtgtccaggtccatgaatcctagcagtgtacaagagcgaaggagggaacgaagagagagttcgagcagggccgtgtgtttcgcacgagtgccaggtgaggcaggtcaggggtccggggggtcgcacaccgtgctgcgtgcgatcggccttcccgccctcactcagcctcaacctcgacctcagcctcggcctcggacgcgaagagcgcgggcggccggtagtctgggtcaaagagcgagttgaggactgctgcgagccggactgccgggcggggggagggaagcaaagggagagcgtcagcggatcagggtcaaggcaggatggaaagaggagagagaaccgatagctggcgaggaggccaagggtgaggggaagagggcggagaggagcggcaagggggttgtgcgagctgctgcgagggtgcgcagggaggaggaagaggaggcgaataaagcgccagcccgtcgcccccgagaccggccaaccgactcaaccagagagaaaggaaactcactcccgcccttagccagctgcttctcaactaccaaattcgccttgagccgtccatagtactctggcgtgtcgagctcgagcagcttcccgtcgtcttcaggcgagtgggaggtcgggggccagacgtatgcgcagttgagcctgcgtttcgaagccagacagagtcagtcgtcggcaggagccggcaggagagtcagcgtacagcaacgaggaaggggtgagagagggccaagaagagagagagagagagagagagagaaagaaaagggggggacagacggatgcgtctccttcgcccaagcgaacggacaccctggcgttgaggcgtcacgctcaacagcgtttgggtagcggccgatccaaggtgggcgggtagcgtcgcctgctggtgctagtgctgctgctgttccgccgggatggccggtcaagtccgccgcctgccgatcggtagcaactgacgaaggaggtgaatgtgaaggagtcggtggagcgcccggcgtccagctcagcatccactcgggcaacagccagtcgtacatccacggagggacgccgaggaggtgcatgagcgtgtcgaccaggggtggcttgagcggaggtgggcgggcggcgaagggctgctgctgcccgatggatggaggtttgggggcgttggcgtcgtctgaggaggcggcagtgccagagccccaggaggagggggaagcgtccgtgcttggagcgagcacgaggtcgtcatcatagtcgggacacaacggccagtcgagcgactcttcgcgccaggccttgcggatgcctgccgtcagcgcgaagggaaggggggtcgcaaggcaaggaggacgggtcagcccgctttccttggaacaaccgaggaggaagagagagaagaggaagaaattaagtccgtaccctcaaagacgatgaaccgcaccaacgggtcgtacacgcggcctctcagcgcccgctcgaccctcccatccccactaccgacgggagaggaggggaaaggcaatcagtgagaccccccactggaggatgctcgttcggctggagagagctcagagcgatcattcgcctgagagccaagagtgtccagccaggcgagaacgctcgtgcgagagggctgctcgcctctgggtccgacccgtccctcgagaagaaaccccgagagcgccactctcgttcccttcttgcacgtcccaacccgtccctccttctccctctctcgtgccctctctctcgctcgccaacgaaggggcccgacccacctccctgcccatccgggccagacgcaagacccaacacccgcaaggacgcagcaacgcaccttcagaacccgaaaggcctcgccaagctccatcgcctcggaccccggcccactcatccttgcagctgcagcggcgagcttggccttgttgcttgcactgctgctgcttgacgaggaggagggcttggacttggtggaggcgcgggcgccggctcggagggttgaggagagggcgaaggagcggatggaggaggccgatgtagaggcggtgagaagcggctgccgggtgcggatgaaagagtcagcgcggatggcgtgtgcgtgtctgcaagaggggcggcgtcgtctgacctgtccgagccttgcaggcagaccgagcgaggacgacatcgtgacggatggagggtagggaggggcgagggcgacgagcgacaagacccaaacgggcactgtacatcccccgattggggccagcaagaccccctatcgaacgcagcagcctcccctccgctcaccctcaccctcaccctcacatcccgccacaacagcatgtccgcccctgtctccgcccagaactttgacgatgccacgcaggtgtgtgtctcccctaactctttcttccgagagggagaggggagcgagaatgccggcacgggtcgtgcgtagacggacgacacctcgctggctggcgggcggccgtcggtcgacccggtctctctcacaccgagtctggagcaggcgctctagctcgagcaagggcgaggatcgggccgcagggggacgagttggacggaggggcgagctcccgtctaacgagcggagagcagctccaagcgaccccctccttccctcgcttccttccgctcttcgaagccgagagccgcgactcttgtttctcgtgctcggctttcgcactacggccgctcgcatctcgctcgctcgcttcgacgagacctgagcgtcgaaaccccctcctcgcgttcgcctctgtgcggcttgtcgcctgcttgggaggccgtaggaacgccgggttggctggctggctagccggctggtcggggtcgctcatcaggcagcaactactctcccttcctccctccctcctgcctgaccggccaacccgacaccgacaagaccaacaaactgacttcttcccaaccttcctcgataaaaatcgccagcgcgagctctccgacttcctcgagtccgagcaggcaaaggcgaagatgcaggcttcgatccatacgtttgtgcgtccccccttccccccggcctatcccttcacgctgtcgtcggtcgtcgctcatgggaaaggcgatatggggggctgacgtgtgttgatttgcttgcgggcgatgatggtttcgctttgggttgtgtgtgtgtgtgtgtttgtgtgtgtgtgtttcagacgagcttgtgctgggacaagtacgtccccctctctctctccctttccttcctaccctttctccaaccgcccagtcgcccccaggtcccggcaccctcaagctgcttcacgcctggcgggaggttctcgccccgtcatccttctcgcacctcactcgggtcctctctctcatcctcgtccgggctcgggcccggctcggtcgactctgatcgtctggcgttgacctctgcctggttcaggatgtcggtcgctcggtcggtctagccacggttgcgctcttccgccgctcgtttcatctctcttctttctcattggctcctctctcttccgcgtctcttccgctccgtcttccttcagcctccgcttccgtgcgcccgcttccctcttccgtagctttcctctccgcttctccttccccctctcgacgacctccctcctccgtccaccctccccctaggcagccgacccgaccctaccccgtttgtctttgtgccagtcccgcctctccttgaccctgccttacactattcgatgctgcagtaaccctaacccgccttcaacaccgtcgaccgtcgcgaccttgccgcagggctgcgcgattttgctccggctctctaccgtgccggtcgctggatctacggctcgcccgctcagctcgcggtcaccggtgccggtggggcggtcgacgtgctcgagtcatcgcaaggggtccgacaaggcgacccgttcggcccgctcttcttctcggtcgccgttcgccggacgctggacgaccttgttcgacacctcggccctgaccgattactactggcctacttggacgacatctatgttctctcgtcggacgaccaggccttggctgaggttcaggacttcttcgacggtcgcggctcgtcccttcagcttaacgtcgccaagtccaagtcgcactcgctggccgacattcgcagctctgggctcgagctgctcggtacggccgtcggcagtccagcattcaggcggtccttcctccaagccaaggtcgaccatcaaatcaagctgcttcggtcactcggcgacctcaagtctcagcacgcgttgctgctgcttcggttctgcatccagcaggatcttcggcacctccagcgcacgcttcggacagacgatctgcccggtgtctgggacgacctcgatgcggccctcgtcgacgcagctctccttcttcggtcctcacctcgacgtctcgacaccgacgctgacctcgtcaccctacccgctcgtctcggtggcctaggggtcctctcgcacgccgaatgcgctccgctcgccttcgcatccggctcggaggcggccgaccgggcgctcgctccagcccttctgctcgaggtcgacgacgacaaggcgatcgtcacccagcgggcccggtgcgacaaggccttccacactcggctcgaacgtgtcctccgtcggctccctggtctcgagcgcgacaccgtcttcgagtccggcacgatcctcggtcgacgttggctcggtgtcgtccctttccggtcggtactcgagctgtcggacgccgaggtcgcctctggtcttcacttccggacgctctgccccggctcgctcgacttctgcgccgactgtggcgacgcagctccgttcggtcacgacgaggcctgctcgggtcgtgctccggtcgctctcggtcgacacgagcaggtcaagcggctcatcaacaacaccctctcctcaaacgccaagtttcgtgttgttctcgagcctcttgtccccggcactcagcttcgaaccgaccttcgcatcaccggtcccgacggtgtccgcgagatcgacatcaccgtcgtctccctcgcctcgcaggacgctcccccctcctcccttccaactcggcatcattcttgcactcctcatcggccaacccacgctcctgtcggcctgcgcaaccggctccggttgagcttgagcttcggtcaatggccgtcctcgaccggacaatttaactcaacctcagtccgtctcgccaacgtccaacgccgtcacaccgactaggctctcttcgacgctttttatcgatcggcgaatcccacgcaacccccattgtcctggcgcgcaccaactgcacgaaacgcaatcggcggcttcctctctctctccttcctcaacttaacccacccgcgagcaggctgtaccagcaggagggcgctcggtcagccagccctgggtttggttggttggtcgatcacgcgggtgtctcctcatgctcgctaaatggtcgacggcgtactcggaaccggtcgtcggtccgagggctcatcacgaggggtcgaaaggccagctttgcctcacctcctggccgcccgcgtcagacgattttcgtcttccccttctttcgtattgcgctcaagggcgggagcaggttgggatgctttgttccttgaatggcctctttcgcatgattctgcttgctgggctcgctggactgaattcgggaatgcgcacaggcaggcggggtggacaaaagccctctggcaaagtggttcgaatggaccactgaccctgctgcgattgaaatgaaacgggtctgaaagagccaagcagcgagtagcagctcacgaggacgaacttctctccttcttcacgaaacgttcgactcgtcgtgtgtgcctccctccgacgatcgctcgccgaaagaaagaccggcactcttttgctggcgtgacgaaccctgtaagcgcgtcgctgctcatatgcgggcgaaaaacggactttgccggcggcaaggcgagtcagccgacatcgtcctgcgtcacgcgccaacccgcggccgtccctccgaacgggccgacccgccggctcttcgactcttcaaccttcaccccagcaccaccttcacacccttcctttccctttctcctgttctcctttgaccgttgctttcgctctctcgctcgcactcgcccgactatgcccgcccagcagacacaagacgcgttcaaggacgtcccgctcgcgcccgaggacgccatctttgccctcaccgccggcttcaaggccgatcagagcgagcacaagatcaacctcggttcgtctacttcccccctctcctccctccgttcttacccctgttctggcgatttgagggggagcgtgctgctgctgctgttgggcagaggaggggagccggaaagcggctgaggagggcgttcggccgaccggaggggaaggtgctgctgctcgagccgcatgcttgcgacgccgctggtcggtcggtgcccctcgtccagcgtcggtcagtcggtcgagcagccgccctttgtcctggctagacaaacgagcgcgacgatcgtgcgattcgagctaagctggaccgttcgagccgcacgaggttggctctggcggtacggagaagggggccggccgttgccgctccgctcaagcgctagccggtcggccgacggtgacgacggcgatgatgaacaacacatcgctcgaagaggcgcgacgtcgagcgtctcgtcgtgtcggaccttcgcccgtaggtggagtcggcttggtctgagaggaccggctgaggactggtcttccgtgcaaagaagaggacggcgtgcgacggctgcctggcgaggtagggggggctcccccgtctgccaccctcgtcctccaccgccgacgccgccgccaccgacaccgccggcgcgaaggtcgagcaggtcaaagagccggccgaggagccacatccggccggcttcttcggcgccgacaatggctaggcggagcgtcctcttgctgctctgagatgggcgctggccggggtcgtcgtcgtcgagaggggcgaaggggtaagaggacagaacagagcgttgccgctgctgctgctgcgcggcccctccccccgcccggcggccgctccctgccagctgctgctcagtcgaaggcagcatgggcagcacgagctcgccgtttgaatcgcgccctgctcgtgtgccctcgccttccgctccgtccgaggacgacgacgccgacgccgacgaggtggatggagcgccgctcgccgccgccgtcctcctccttcgccggcccgagcccgctcctgctccccctccccttccggcgcccggcgagctcggcccagagaagctcgagagcgagccgagcgaggacgagagcggcgtaggccagctcgagctggccgggagggtcggcgatgtcggcgagtagagcggcgggggggtgcgtggagggccctcgggtggagaggggtcggtcagagcagcagagacgggtagtgaccgaggcgggaggtttgggtcaagcgaagaggtcgaccgaggcatactgctgctgctcgtgtcgtctacgatgtcgtcgtcgtcgtcgtgcgagtctcgtagcgagtcggctggctggacgtcgtctgctctggtcgtccgactcggtggaggagcaccgccagccgcagcagtcgacgcagccggtgcgatggcctcctcggtcgagacgagcagcgccgagtcgaagcaggccgacgacagacctgaagagaggaggtcgtatgacgacgacagggtgctatcgtccatctcgtggaaggtgtaggtcatggtgtaagggagggggttaacgggctggctgccgacgtcgacctctactgcagcaagatggcgccgttgatcaccgtcgcgacgtacgtcgagagtcatgccatgtacgaccgtcttactgacagccatccctcgtgtcttgcagctggtccgtctgctccctcctcctccagcagcagcctgcgcgtccctgaccctcctttcctctgcccgccagctcgctcaaccagtgggcgctcgactttgccggcaacaagcagcgcatcctcgactcgatccggatcgcaaaggagcgcggggccaagctccgggtcgggcctgagctcgagatctcgtgcgtgctccttctcccctggcgggctggcgagctgctagctgactcgtgcacgacggcccgaccagcggctacggctgcctcgaccactttctcgagggcgacaccatgacgcactcggccgaggtcctcgcagagatcatcaccgaccccatcgcccaagggatcctgatcgacgtcggcctgtgagtccggccggggatgagcgcgggcctgacgcgtcctcgaacctcgctgaccgccgccgccgccgccctggccagtcctatgacccacaagaacgtgacatacaactgccgtgtcatctttaaggacggcgagatcctcctgatccggccaaagatgtggatggccaacgacggaaactacgtgcgtcgtcgcctccccttcgactttgccgaccgcgagtcacgaccgcgcagcccccccccccttcctcgacccgccaagctcgccaccactgctgaacggggggggttgccagcacggccaggcggtgacggagaggaggaacgcacgcgcgacgcaggcaccaatgaccagcgcttcgaggaagctgagctcgggaaacaggccccagacgagcaggctcgaggcgaggaaggcgcaagtcatgactgggaggagcagcatcaggatcgaacgccactccttgcgcaggtaagctttgggcagagcgactgcgacaggtacccttgatcagctgccatcgaggaataagccgagccgagctgagtctcggcgacgcactgcccgcaaagaggacctggatgccaatgacgatccggacgatctgtgtgcggcagggcggcttccatcagccggtagccagagccaagccagggcaagagcttgcagggcgaccgacctggaaggtgagctcgttgcgttcctcctcggtctccgcccattcgtttggcttgaaccagttgagcgcctgcggtccgactgtcaaggcaaggtcagttgcttagcagtaggtcaggtcgcattgatttcggacggggggaggtaccgatgatgccaaagagaagcgccatgagcggctcagagaggtagagccgctccttggcgaggtaggtgatgagaccgacagtactgatgtagcccccgacgagggcgagcgagatcgacacctggtcgacgacgagctcaggcatcttgaggaaaggtgagaggtgcgggttggttgaagcgaggccggcaacgttcgaagggcgagctcgcccgggctgggtgttatgaagtggagacgataaggaggaaggagatgacgacggccgagactagcatgcaatgaagcggctggtaggagggctgctgaattgtgtccctcgtctattgggggagggggagagtgaggtgatttgggaggggatagcaggggcagcagccagcgcagggagaacgtcagcagcgcaggaggggcgcagcagtcgacagaaatagaacctcatctcgaccagggccagcgacgagtctcgagaagactgcatcgcatcagaggaagcagcaggctgcagacgtttggtagatctacgtttgatatcgagcgaagcagcgaaaaagggagaaaatagagtagagagggaaacgggaagggggaggggaagggaagggcaggcgtggcaccaagagtgcgtgtgacatgcctagggaagggaagggagaggcggggcgaggcaagcgcgcgctacttggcgctctccttgttccgcttgatgatcttttcggcgttggggaagacatcctcggcctgggtgtcgaagcgggcgaggtccttctcctcgtcggtctggcgcttggcgaccttgtccgggttcatcttgcgccggatcagcttgtagagctcagtgatggcgaggtagagcaggacgcagatgacgacgattccccactcgtagccctgaagatggagaaaggaaggtcaggacggctggtcacagcctaaaagatcgaacgttgtcacgcacgatgccgacgacttggaagacatagtccgagatgaccctgagagagagcaaggacgaggcggtcaggaacgccctctcggcggagcaaatcaacgacggcacgcacgggatgtagaggatcgggaaggtggcgagggcgcagatcgaggccgaccagagcaggaccttgttgtcgaacaggttcatctggaagaggccaaactcggcgctcttgcactgtggcaagggtggagggaaccgtcagtgggcgggccgactgggcgggcgggtgaggctgaaggcgaggtcgagcgagcgagtgcgagcagacgaggagcgctcgaagcggctgcccgctccttcgcccaaaccagcccccaagcaagcaaaacgcacctgagtcaacagcgtccacgcccacgggatcgcctccttcttgaagtaatcgccaaacgaccagtttccgagcatctcaaacatcgagtgatggtagctgtcgcggccgacgtcctcgaggtcgttgtgctttccgccggcgcggatgcacttttgcgagttggtcgcacgcgtgagctggccgagggccgacgaggggtccgaggtgccgaggaagatcgacttgtattgattcatgccggcgttgacaaaaaggagggtggctgagggagagtgaggcagatggtcagcgacggcatagggggcgggagggtatggatggcaggcgggcaggcaggtgccagcatcgcctgtgacgagaggacgacgagcgggcaagcgcacaagcaccctccctgctcccttccaatatgcgcagaggactgacggtcctcaaacgggatgacgctccccgacttccaaaacgtatggccgtgggtctttgtaaagaagtcgatgaaggttgaccggacgcggtgggccggccaggcctgcgggtccgggaaggcgacgggcatcactggcggcgggcgagttgtagagaagaggcggcgggtgagggagggcagccgggcgagaggggagggcatgcaggatggagagagagagggaggcgagggcccgagtcggagagagagagccgccgggagagggttcccacgggatgaggttccggaggcagattggtcagccgccctctcgctggccctctcgctggctctcggctgcgcccgtccgtctctctccatcatcaaccctcccctcgctcgcagcacgatggacgacgacggtggcgagtctcagcccttgccttctctctcgtctcgtgctgacgtcattccctcgctccttgccaacagatgtctgccgcgtctgccgctctggcccgggtccgtcttccgccaactcactctcacccctctctctcgctgacggtccttcgcccccctccatagagcccggtcagccgctctttcacccgtgcaagtgctcaggcagcatccgccatgtccgtcctttccgcgcttgcgtctcttgcacccattgaccccgacctcgcccccctcgcgcaggtccaccaagcgtgcctcctcgcctggctccaagcgtctcgcaaacggacgtgcgagacctgcctcgccccctttcacttcacgcccatctacttgccttcccggcccgctcacctccctcccgctcttctcctccttcgcctcacccaacgcgcactcgccctcctcctcagcgcgctcagggccgccctcgccgcactcgtctggatcgcgatcgtcccctggatgtccatctggacgctcaggttctacctcgcgctcggaaacacggtcgcgtggacgctcgcgggaaagggggcgagcatgcccgaacggtttggggtcgcgggcggcgggctcaaggcggcggcggcggcggcggcggcagcagtaggaaccggcaaccagacgctcctgcttgcgggcgagcagctcgcgggtggcttcgagaatgcgactcgctcgacggcggccctcggcaacctcctcacgacatcctccttatcttcggctcgctcccaaccgaccgccggcctcctcccccccgtccccccgccggccgatctcgagttgccgccgctgccgctggagccggtgaggaacgagaggaacggccggcggctgaacggcgactgcgccctccccggccttgtcgaagccgatgtcgatgcggcgaaggagcttgatgaagggcagaggtagagtcgtttattcgctgatgagccaaggtggacgagcgtccggaccgggacgaacttagccgacatggtgctggagggggtgacggttggctggcagggagggagagcgccgtcgatgctgcctcgagcccttcttgacctcgacctcctccgaccatcgacctcaccctcgtccagacgcactcgcagcaccttttcatctcttgttcacacacgcacacctctcgcccatctctctggtcgttctcattgagccgaccccggacctccttcgccccaccgacgccgcccgccgcctttataccctcgtctcgagccaggccatgaactgctttcgcgtgtcgtcgagctttccctcaaatgcaggcaccaggtcacatgccggctcttcaaaacagacgactgtacgtctcccctcccctcctcctttcctgctttgccgacgtcgcttgcttgggcgaaaaggcagccagccgggcgtgtcggacgcgtcgagaaggaaagacgtcactcaacagcccccgcccgcgcgcacgcgcagggggtcggacgaagccgccgccgtcatgccgtgcgctgctggacgctgacctgaccgtcgtcgtcgccgtcgtcgtcgtcaaatgcggtagagttgggtcggtcggtcagtctgtggacggctggcagggcgacgagcggcttcggggttgggcgtgctgccgcctgctctctttcgggagcgacgcccgctggaggacgagaggacgagaggcacacacgcgttgaatcaacccacttggcccgagcctcacaacatccgacttaacatctcccctcgtcaatctgccccggcccttttgctgacccgtacggcccgcccttctccatttctgcctggtacgacgacgaccgaccgaccgaccgaccaacctattgcacgcgcaggccgtccagcgcaaactcgtcatcttaggggacggtccgtcccttcccttcccttcccttcctccgcccgcagtagccgcctccgcgccctctcccttgtcgactcgactcgactcgacttgacctgacctgaacctacctcacacgggcccaggcgcatgcggcaaaacctcgatgctcaccgtcttcacccgcggcttcttcccggccggctacgagccaacggtgtttgaaaactagtgcgttcccgcaggcagcggccgccagagcttctttgctcgtttcgctgtcggtcggtcatcggcttctcccttcggctggctggctggccgacggctgaccgccggctagcagagggctaacgagcgcgagcgaaagccatcgcgcaccgacctaacccccccccccgcctcccccgcagcgtctcatccgtccgcgtctcctcgacgctcgtcgagctttcgctctgggacacggccggccaggaagagtttgaccggctccggtcgttgagctatgcagacacgcatgtacggtccccccccccctccctctttccctccgactcctctcattcgcatttgctcgagcgtcgacgtgctttgaacgaacgtgtgcgcgtgcgctccgcctcctcctcttcctcctcctcctttgcgcgattcgaggggagggagtcaattcctggcggctagtcgagtagagacagagaagacgcaccagttcgacatggtcgagacagcgttggccttggtccggatgcggagcgggttgagctcggcggggtagagccaggggaggggaagccaggtcgtcgcaaagaagacgatgtagaggaagagaccaaaggcggcgccgttgagcgacgacgacgtgttggcgaggatgcaaccaaagatgatgaacatggccgtcatttggccggccgagccgatgaggaacatcttgcggcgaccagcgcgctcgacgtagaggaacgaggtgagggctgaagcggcgtagacagtcgaaagaacgccgcccaggatgagggccatacgcttctcgaagcccatgttctgctcgaacaggacggtggcgtaatagatgacggcgttgcaaccgccgagctgctggaagatctgcgacgaggcaccgacggccatgcgccggaagtgctgcttcttgccgccgacaaagagctccttgtaggtgacaccggcggccgcgccggccgaagcgttgatgccctcgacgatgatgcggatctggcgttgggtgtcctcgtcatcgagctcctggtcattgaggtcggcgacgacctgcgacgcagcgtcgtagtggccgtggacaaagagccagcggggcgactcgggcagcagccagacaccgagcgagaggagggcggcgaagacgacctggagggcgatagctgagaggcgagaagtagaatgagcacgggccgggcagagcgagaggtgaaaatagaaaggcaactcacggaaccgccacgagaccgagttggggacgtacgacaggccgaagtcgatccagtaggcaatgcaggtgccgacggcgaccatcgaggcctcaacgcaggtgaggagaccacggttgtgggcctttgagcactcggcgacccacgacgggatcgtcgcggtgttggcaccgttgccgagaccggtgatgatgcgaccgatcataaactggaggaagccgttcttgccggggatggcggtgacttgaatgacggtgccgaggcacatgatgagggagccgagccacatcatgcggcgccggccaagacgctcggcgatgaagaaggcgcccatggcgccaaagaagcagccgacctcgtagacggcagtgacggtgccgtggatggtggccgtgtggacgtcgtcagggccactggcgagcgtctgcttgaagtcgttgttaaagacgttggcggctgcgacaagaagtcagcgatgacttcctcaaaggcaagcaagagaggggccgacgtactgatgataccggccatgactccctggtcgtagccgaagagaaggaaacccatggtggcctggaagcatcacggagtatgagagcagggtcagccgctatgacagacaagtgcacaaagcgccgacacccgatacgcacggtgagggtaatgccgttgatgagcttgttgccgcgcaggccgcaccatcgccgggcagccgtctaatcaagaggttgcacgaaatagaatagacggtcagttcgactggcggcggggtaggtggggcaggcaggtaaggggcggggacggacgttggcgggccagaccgagttggtttttttggctgcgacggccaccggctggggcttctcttcgtactgagctgccgccattctcgaaggcgggaaaggtaggtcggtttgggggatgaagcagggcgcgggggggtaaggatttactgctgagcggcggccatctcgacagctttggcggcagcctcgtcaaggtcgtctgcgggacggagcggagcgggagggaggggtcagctctagcgcgcgagcgagccgtcaagaagggagggagggggaccgaccgaaggggtggatcttcatgcccgactccttgatcatcgccttggcctccttgtcggccgtgccctgcaggcggacaatgacggggacagtcatctcgagctccttcgtggccttgatgatgccctcggcaatgacctgggggttgcgggcaggagggagggtcagcagctatcgagcgacagatattggcttggagatggacgcacgtcgcagcgcatgatgccaccgactgtaggagagcgaagcgcaagagggtcagcggctggagcggtcgcgggaagggaagcaaaacaggaacgcggggctcacagatgttgacaaagatggccttgaccttcttctcggagaggacaatctcaaacgccttcttgacggccgccggggtcgctcctcctccgacgtcaaggaagttggctgggtcgccaccgttgaggttgaggacgtccatcgtcgccatcgcgaggccggcgccgttgacaaggcagccaatgtcgccgtcaagcttgataaagttgaggccgtactgggcggcgtcgacctctcccgggtcctcctgcgacttgtcgcgcatcgcgaaaatgtcagcctggcggaactcggcgttctcgtcgaagccaaacttggcgtccatgctgagggcgaaagggagagaatgtcagcaaggctgggagacattccgacttgcagtcgaccgtcgcggctgcgcaccagaggatggtgccgtcctcgagctcccccatcgggttgatctcaatctgggtggcatccttctccttgaagattttgtagagattctggaagaccgaggctgcctgcttgcgcgacgactcggactcaacgccgatcttgacggcaatctcgtaagcctcggcgtccgagaggccgttggcgtacgagatcggggtcgtgatgatggcgtcagggtcagagtgcgcgacctcctcgatgttcatgccgctgcgggtagcgacagggaggagagtcagcgtgagggccagaccaacgcgatttgggccgggtccggctggacgcacccctgggcggacgcgacgaggacgggcgactgcgtcgtgcggtcggcgaggacagcgacgtagtactccttctttgggggcgtgcgctcagcgagcatgacctgaagggatgaaggcagtgtcagcgcggctgccgtgagatgcgcggcaggaaagcgtcgagctgcgactgacggcgttgcagagccggccggcctcgccagtctgcttggtgatcaggtactggccgagcatcttgctggcgtagtccttggcctcggcagggctgtcgccggcaaacagcagctcaatcagtctcgcggaagggtcaagagcagacgcggccgacgcgaggccgacgcacgagttggacatgtggacgccgccctggaagccgttcgagaagtggcccttgccacggccaccggcgagaacctgggccttgatgacgagctcgttctgcttagagcctgaaggagggcggcagagctcggtcagatctgccctgcgaccggtcgtggcgggcgagcagggatggtttggggcccgtacaccacgccctcgcctcctcctcccaaagcacgactccgacctcgctcctcccatcccacagcgccacgtcccccctctcgatctgccttgtgctgtcggccctcgaagggaaagagcgaagcgtgagggagaggacgagagggggaggtaatcgagcgaggacggatggaggtaggggtgccggtggactgatggagacgctgctgctgcgacgcgcccgtcggatggaggcgctcgacgtacgacggcagacgacgacgacagcaaggggttctcgccaggcgcagaggacgaggccgacccgccgatctgcgtcgggaggaacgacgagccgttgccgaccgactcgtcgtcgtcgtcatcggcggtgggattggagatgaacgagtcgagtccgatagaccggctcgtcccgtccgccaccgccgcagctttcgtcgactgcgcgaggcggaaggagcatgagtcgtcgtcgtcgtctggggcgatcgacagcccgccgttagtctcgtcggcctcgtgctcatacgcgccgtcgctgccgtcggggtgcttgtcatcctcgtcatcgtcgccttcgtcatcctcgtcctcatcggcgccaggcgtcaacagccagtcaagcgtcgtcgtcgatcgctcatgcatgtcgcccgagcggcgctgttggtgagcgtcaagaggccgaggtagacagtcgtctcctgcgaagcggcttgacgcgcttgtgcctgaacactcgggctcggtccgtttctggtggagagggacggaggagggaacggcttgtgctggcgctgaagcgtcgcgaggagaggggcgtcgtgcggcggcagtgaggaggtctgagcggttcttgcttttactgaggacggagctcgagctggggctaaaggaggggtcgtcgacggcagcgggagggaggaggttgtcgagcggaagagaccgagccggagatggcccgaccggaggcggcatcggccggagtaaaggcgccggcggttgcagaagagcatcgccaagccgaactggcccggggcagctggcgtttggcagtctacgcgcggtgttgagctgcttctgtgagttggcgttgttgggcgaatttatgatagaggggtcgtggtcggcagcgggtggggcggctccagctgctgctgctgttgttggcgattgtagggatcgtgcgaagccaccacccgccgccgtcgacctcgactcgccgactcgccctcccgccggcccgccactcccacccgcgtcctcttcgatcgccgtgcctgccccgaagtcagggaaggacaggctgtcatgtcgcgtggtgatggtggcatgctcgaacgagtagctaccggggacgggccggtcgactgcggagctgctgctcgtcgaggaggagcaaaggtaggagctagcggagccggcgggcggtgccagtgccgctgctgccgctgtcgtctgcttgagagaggacggtcgaccgacctcttctagctcgccatcacccgccaccgccgccgtcgcctccttcgcctcctcctccacctcgcgcctcagccactcgcccgcagcacccctcgtccacccgcccaggaagagatggacagccgacccgggggcgaggagcgatgttgaccagtgtgttttgttgggccgctggcgtttgtgtgggcgggcagagcggggtgagaggggcggcatgcggtgtcggtggggagatggagggggcgggggaggtgaggagcgcgagggaaaggtagtggagcggcgtgtgcgagagggcgagtgattggaggagctggacgatcgtcgagggcggaggcttgtgcaggtggtccatctgcgcggggaggggtcgagcgccggggatcagccgagtgtaggcaaaaggcggacgcgggctggacccattaacggcggaagaaaggtcgccggagagcgcgcctccgaatcatcaagccctgccaggcgaccagccttgagggtagggaagggatgatgacgcgtcggacgtaccctcgcctcaatcagctgcgcccagtagtaggccgtcaggtcggccgtttgctcggtcgccgtcagcgagagcgcttgggcgatcgggtgagccgggggcgctttgccctgcaggaaagcggggatatgaggcgggtcagtctgggaggctgtggcgagaagggacgagtcggccacaagccctctctggctcgatggacgacggaagcaggagggaggaggggcacgcgccgtcccgcaaggtcccgcaagagagaagggacgaggaaggccgcaccgccgaaatgtcgcgaacgacgtccttccaccagcgaagcttgatcgacccgagctgggcgttggtcgcgccctctgcgatcgtcgcgagctcgagctgcgggccgtgagagaagggaggtgtgagggtgtcagcgagcgatcgtggtcgatgagaaacgtcgagccagcggttcggcacacgggctaaggtcgtcccgggttaaagagagagagagagagagaggaaatggaccgcacgttcaacgctctgtacgcccagaaggcctcgcgcgcccggccggccgggtagaagtagctcgcgaggaaggcatcggggtcgtgctcacgcacgcgctggcggcagtgaccgatcgggtcggcggtgggcgctgctgcaggtggagccgaggcgagggtgcgagtcaggaggagggaagaagagggtgctgctgcttgaggcaggcgggtgaggagtctgttggccatcgttgtcgtcgagtggaggaggggaggatcgccgtcgggggttgaacgcgcggctgggtgactgaaccctaacaaccacccttagcaaccggccatcgcggagtcaccctcgcgcgtctctctctctctctcccttgtgccaacaacccatcattcgctcgcccagcatgtccaagcccatcaagacggccatcgtcggcacaggcatgtcggcccagtcagtccgccgtctccctctgatcagcctctccctgtctgacaccgcctggctcgcacaagggtcttccacgcccccttcctcttcgccctccccaacctcttcaccctccacaccgtcgtcgagcgccgcgcctcgcccgagcactcggtcgcccgcgacaagtttggcccggtttttggacagggcctgaaggtcgtcaacacgctcgaggaggttctggcggatgacgaggtcgagctggtgatcgtgaccacgtttccggagacgcatgcggcgatggcgaaggtcagtcctcccagacgagagagaggagcgagcgtagcgaggagcgagcgaggcaggcggagcgaacagagctgaggtaggccgacgcacccttgctcgctcttgacctctccttctactccctgccctgcctgtcctcctaccgcgcctcacactcgctctccacctcttcccgcagagctccccgtcaatgagtacttctcctactttggccccgactacgagctcgacgtgccctcgtcaaaccaggaagacttcaacacgcccgagtatctcgccaagatcaaggcggccatctttgagcagatgcgcgacaagacggccgtcccgtcggtcgggatgcagggtgcgctcctcctcccctgcccgctcggggcacgtcgccgcgaggcctcgaactgactcctcgccgtctcttcccccttcgctcggtcaggtatcccctcgatgccgatggacgccgtcgatgagaatgcagacgaggacgaggccgacccggacgaccgcaagccgcagaagatctgggaccggcacgttgcgcccgagactgagctctcggactcgtacgtccccaccccttcctctccccttctcggcgctcgtgcgctgcttgttgctgttgagcgcgcttgctgatcgtcctttgctttcggccgctgtagggaggacgaaggccagacgggccgcagagagcgcaagtcacaccgcgagccgtcgcctcgcgagggggcttcatcgcgccgccagagtccgccgccgacggccaagggcaaggaacgcaagcatgagctcgtcccgccgttgcctccgccgccgccgcctccagcagcagcagcagcagcagcagtagaggccgggccgagcgcagcaacagcggtcgctgcttcgaacgggctcggcttggcgacgacgccggaagcggcgggtgcgtccccagcggcgagcccgacgacgaacggcaccggcgcttcagcaatggctggcagcggcggcggggcgggcgtcaatgcagaggagagcgcgccattggccggcgagggtcagccggcagtggttccctcaacgacaacgacgacggcggcgccgccgccggcagaggccgctaagtcggatccggcacctgcgctgacgctggcagtgccggccggcgaggacgacgacggcgcgggtgcgatggacgtcgacccgccttcagggccatgagctggccctcctgccctttcctgggtctctgcttgttggatgatgatctcttgtgttttgcgacgactgccaagggcgaggctgctgctgcggaagatgacgcgcgcttgagcgagctgtcttgaccttctctccatccaccacccatccagcccatccatcccttcaatctattctagcaaccatggggtcagcatcgctcgcgacctcggctcattcagccgcgcaggccgctgaccgtctccgacgacagacttgcagcaaagatggccgccgcctcggccccggccggcgccgcttccggctttgccccacccgccgcccagcagcagcaggccttccagcctcctccccagcagcagcagcagcagcagcagcagcagtacggccagcagccgcctcagcagcagcagggaggaggtgtctccaacgccccgccttcatacgacaactatgcccagcagggccagccgggctcgttgtccgtcgtcgtctcacctcctcctgcacggcggcacgagatcgttcactgaccttgccttttgactcgctgctttcaatcttcccagccaaagcgctcctggaggcttcgctccgccccccgggtccgtccgacctgagctcggcttcagagatggatgttcgagctgacgccgatcgcaacccccccttcctccttcccgcgggcggccgaggcgggggcggcgacctcggcggacgaggcgacgaagggggtgaagatggcggtgaaggcgtccattgttgaggatcgaggtgttgaaaggaaagtgaggtgagaagatgagagatgagagagtgggatgagggatgagaagggaagggaagggccgagggcgctggccttcataggccggccggggtcagcgctctctgcccagccggcgggtgaggacaaggcgaccagccccctgaaacggtcagccggtcagtctgctggttagctgggcagacaaagggaaggatgagcagcgaacaaggcccgtcggccggacataaggcaggtgacggtcggcgagcctgagatggacggctgcggtcggtgcggccttgtcctctgcccggcgtgggctgaaagtcgacggccgactgcgcagcagccccgctagcatcgacggcctgttgccgcccgcctcgaagcaaggtcggcaggaggagctgaccgtgactactcgtcgacctgcttcttccctcgctcgacgcacagcgacgagcagtcgacggtcggcggcgagcaggcacgtcgccctcccggcctgatcgccatcaaaggggccgctcgacgcccagccccgcccttttgtcctgctgccacgctcttccttccgaccaagaagccgaccgggcccccagacggccggctggccttgtccacagcctgtcgacgacggccgccctttgatcgtcgttccgaccgaagcgtcgcccagccgcgctcaggcgcaccagccaccatcagcgccagccggctgcgggccttttgtctggccgtcgaccgacacgccaaccgtttcagcgggcgggccgccttatcctcgacctgacggctgtcgaccttggcaggcctataatggccagcgccctcgtccgtcccccttctctcccctcatcctacactctcatctcatctcatccctcccgctctctttctcactctcctttcaacacctcaaccgtcaacaatggacgccttctccgccatcttcacccccttcatcgcctcgtccgccgaggtcgcctccgcctcggccgcccgcggcgagcgcaagagcgaccaaaacggctttttctgcatcatcgcctaaggtcccggtcatcgtacgtcttctcttctcatcttcgaggcgacgactggcctaaagctggcggctgacatgctcgccttctcctttgctcgcatctgtggcagtccaccctctggtcctctctcggagccatctcgcggtcccggtcgatcgtcggccagcactggcgctccctcgtctctcggccgtccttcatcctgcagcggtcttcttcctcttccgcagcggcgcctgccatgagttatgtcttaacacaccttgaactgcctcggcgacctgctctctgtcagaagttctgcctgtcaagatcaatccagaattgccccgtcagctcacccaggtctctcgctcggatcccgcgttctcatttccgtcagcgtctcgacggcctttcctcaacgtgccttggtctttctcgtctcgtcagacgactgagtgccagtcagcgaccaacgatcgccgcaatcccttcagggccagccagacgagccgacaaggctgctgctgcgggtcgtgccgtgaccgcagaccgaatcggagctcgatggcagagttgacgtggagaagtggatggtgggtgggtggagggcgtgaacaagtcgactgccgactggataagacgaggtggtggtggctgcaggatctactactgctactgctgcaggaggtgcgctatcgtctcctgctgcttctgctgctctctcttactgatggtcgttgcctcgctggagatggtcccgcagtcgcccctcaagcgaggcggcgtcgtccctcccattctgcattgcccctccttcccttgcatcactcgtcagcccgatcgaaccctcctcctcctctgctctccaccccgccaacagacacccttccagacaccatgttttccgaggaaacaaaggtcggtccctgcgctgcctacacaagagagagagagagagagagagagacgagagtctatgctgaccttgggtgcttttggccgagcaacaggagcgcatcaacaaggctatcgacgtcggccgggtccgtccaaaccctcctcgacgactcagaagctgctgctctcgagcgagcaaggcctcttgccgtgcttgcgacgctaacacctaccttaccccgctttctctcgcacgatctcgtagacggccatgatgtacggctggatcccgtcagtcccccttccttcctggtttcctctggttcttctcgcccgcgcccgccttcgcgaccgccctcacaactgacccccttgcccgtcgcctgcccgcctgcccctaatcaggctcatcatcgtcatcggtatgcgccagtcgaacccccagccgtcattcatcaagctcatctcgcccctcgcctaaagcgaaccgggatacaaatcaagtctcgcaccaaacctcaacggggagggggggcgccgaaagtcccacgcttggaaccgcgcgtttgccccctagcctgtgccctcgccgtcgccgccgccccgtcttgagccctgtccggctcgcccaagcgcgctctgtagcatttctcccctctctttcaaaacacctagcttggcccttcttcagtgtgtgagtcctcctccgctcgctcggctagcttagctgcccgctcgcatccgcctcgcagcacaggcttcccgtccggctcaaaagacgccgggtcgacgagctttgagttgttgagctgagctttgctcgaaacttgctacttgagcgagtagcgagtcgagccgggccgacttcgacctggaccgttttcgagagggctctctccgaagactcgacgaggggacgaggctgaccctcccccttccttcctcctctcccctctccttcgcgcaacatagggattcaaagcaccccgtctcaacatcgctcctcttgcaggagcagctgggcgggcgtggaaagtcaggaagagagtagcagaggtggaagaggaagaggaggaggaggaggaggaggaggagaaggaggaaggggtaggaagaaggtcggggagcaagaaaaggagcaggagggaaggagagggcccgtgtggctgagctgactgaccgctcgaccgcttaacgtgcaacgcgctcacaggttcggaagtcgttctgcccacttgcgtgcgtgcttacgtgcccgtccgcccttccggccgtctgctcgcgcggcgtgatgcgaagcgaggcgaggcggaacgagcaaagggagaaggggccagacggccataggcgcgccgagcgagggagggctcgagcgaagttagcgggaggaggagctcggggttgaaccactcccgcttccgttcgcattcggaccgccgagaccaacagcggctgtagatgaaattgaggaagaaggcccagacgcgagggggataaagagcgaagcggaccggacgctgtagggcgcagcggcgctcttgcggcccgcctttgacccgcctgcgccgttgctcacggcagctgtcgtcgaggagggaccggcagaggccgacgcagtcgttgaaagtcctgtggagatggtagaggttgaggtgggggctggagcggggacggagccgtcgaaggacgaggggtggcagcgccggcgatggcggaggaggacgtccctgtcggcggtggacaaagagagcggggggggaggagggagtcagctcggacgagatatagagaggtcgcgttcgtcctcgcctctactcgtgcgagaaggcgaggaggagggcgagaagaggcgtcgaggagcgcagagggtgccttctcgtcgcgttcgagaacggccccccgttcgagcgagcgagcctcccccctcccttccgccgccggcgcctctcacctctcgcacctaacagaacagcacaagaggtcgaaagaggacgtacgatctagcaaaggacttgctgcactctgggcacgggaacggcttcgagtcctggtctgctcgcgcgcgaaagcggggagcaagggaggggggggagagagatcagccggctggagggagcgagatattgggctacttgaaggcatccaagactgcgaggtgtgcgataaaagcaaaagaagaggacggacgcttcctctcgtgccgccggacatattcgagcctgataagacagggacaagacgagcaagagaggacgaggagaagagaggaagtcgtcagtcccgctcgccgtcctctctggcgtgatccgagccgatcgtaccgtgagtacgacttggcacacgtcccgcactggtacgacggctttgcgcctggctgctgctgctgctgcggctgctcagcaggagggggcgagtccatcgttggttgaggtgcgcgttggagggggaaggtggaggggcgccgagtggagggacacgcttgataagagcctggtgggatgcatcagagggccatgcatgagggcggacgggtgcgcagtctgtcttccgaccggctctctcctctctctgaccgtcatctcctccttcagcatgtccgcctcgtcttccttctcagcagcaaccgcgccgcccgactggccaaaccgctggtcacacgtcgagtctgtcctgactcctccacctaccatgacaaccagagctgacccctctttggccgctcgcccgacagcaagttgctcgaccggccagggccgtcgaccgacccgaacggcttcatgccgggcgacaaggtgcgacctcctcttgcttgcttccactcgtcctctcgcgccttcgctcgccccggtccccggcccaggggcaggcagctcctcctacccacgctccacaagccagctcgctaaccctccctcgtataccccttgcacggaaaggtcaagaccttcctccgccaagaatgccagatcctcgtcatcggcgccggtgggctcgggtgcgaaatcctcgccaatctggcaatgagtgcgtccgcctgctcttctgctcttggcggggctttaggggaggggggagagggagcagggggcgaggggatggtcgaaggaaaggaggagaggaaggagatggagggactgtttgcgatggtttttggaccggcgctcgactacgtccaggtgcgtttcgggggtgttcttctttctgccctccttgcacttcccccgaacggagcgctgcttgagctcaaccgcttacgcgcgcctccgcctgccctctccaggcccagataaccgcgcttctgacgcccctcccctcgcccgctcaccttctctccttcctctccctcctgtccgccctcctctccaccgctcactcgcgcggaatcaccccgctcatcccgttcctcgtcaagcagcgcttggcgctctggccgcttctccagaggcggatcgacgaagaggtggcggggttgaaggcgctaggggagagggcggcgcctggcggaggcggcctgctgggcttagtcggggcgagtaaagtcaaggacgcaaaggtccagaaggtgcggtttccccggtcgttcgcgcgttccgagctcagggggggttggaaagggctgatttgagggcctacgtacgccgactgctgcacctctgtgcgccgccagattgctgagcgctacacggcaatgttcaacgcgctcaccgccctctcgtccgaagaggatgggccgatgatccgcatgtcgttcgtcgcgctcccttcatcgccttgcttcttccctccatttaacgcccctgtctccccttcccgtcctgctaggctcgcccgcctccgcagccccctcgacacactcatcaccgcccaagcctccaagatcacaaacccccaagcacgagaggccttcatgagcggcatctacgaccggctcgtcgctggcttgcggctggcatttgccgggttggagagccaagagaagggcgaagggacggcagcggagattgccttttggaagggccaggccgagggggcgcagacgggcgctgtggggaagcgatgatgggagacggagggtgggatgtcatggtgtgctgcttgcgacgaggtagattgcccagggacgagggagcctttcgccgcgggcagagggttgagtcattgcgcgcgcagcagcagcagcagcagcagcagcagcagcaagaagcccgcggaaccgacggcgtcccccgatacgggtgaacctcctcctcctcctcctcttccctcgtttgctcctcatcacaaccactattcccttctcccacgatgtcagcagcagcccccggactagctgacttcgagctcgacgactttgccacaccaacagcgacgagccggcggggctcgcacccgagctcaacggccgacctcaaccccacctccttacaagcagtgaccgccgacgatgaggacgatgaggacccggcgtttcactcgagcaggaggtcgggcgacaggccacgcgagtttccggccgaactgccacctatggtgcgcccctcagggtggaggaggggtgtcgtctcttgagagagagagatgtgattggagctgacccgaccgacctctccgcctcattctatcgtacgacgtaaggacggcggcatccgcgcctggtcattcctcgccgccatctttgttctcgaggtcctcgtctggggtcttccactcggtcagtctgacccctgcccagtcattcagggtggggcaggggtcagactgaccgagtggaagacgtctggaagctccccttcacgcccgcgatcgccaacctccgcgagcacgcagagtcgaagagaccgatcaagacgatggaacgaagcgccgacatcatcccggcttggaaggggtcagtgtcggctggtggtcgctcttgcgcgaaagcgatgttctcgctctcgctcggcttcgtgaatgcgaagctgatcctccagctgctcgtctgtcccggtccggcccaggctgatcttcgccgtccacaacggcaagcaggtcagtcggtcccactttcgctgcgctcgcccgctcaccttcttctcacctcgtactgaccccacccaccctcttgtccaacctggcaggtccgtctcgtcctttcccattccacgctctcagcctgctctcctctgctttgctcgacgcgcatgcctacaaagcgcacgcgtccggcaggcagcagctccctccccccctcccccttcgctccctccagctaacccctctccccccttccaatcgctcgcagtacaagcaagtccagatcacagaagagatgattggccacaagctcggcgagttttcccacacaagaaaagagttttcgttccggcagacgaagaacaagtgcgttttgcccctcgttctcgtgctgctgctgctggatgggggtgagtggatcgggtgggcgacgtaccctggacgtggttggctgggcggccagtcgagcgaggagctggaggcagcagacatgcactcgctcgctcgctcgctcatctgctgccggggaagcagaagaagggctggctcgccagacccgaccgaccgccggctctctctcttgcgcgcgcgacgctcaacccaagctgacctgcttcactctctctctcttccaccctcgcaacccaggggcaaatgaatgaccttttgtcatcgatcgagagtttagccgggtgcactgctggcgaggcgacgtccgtccgtccgggagtcagggagggcagagaacgggagagggcttgcaacccgctgcgcgcgggttggtcgagtgtaatcgagaggggggcttgtcggcgagtcgtcactccagactgactctctgagcaatcgtaggtcagcgcgagctagacgagcaagcgtcggcgtgtcgatggagcgacgaaagaagaggaggaggagggcgtgcatgtatgcgccccaggcttgtcgccgaggaagaggcaccgacctcgctgcggcccgacgtctgatcgccaccccgtcctcccttacttgccctgctcctgatgcgcttggctcaaggcgacagctaaccctccctcacttgggccatcatgcccttcagcctcatcggaggacgcccaggcttgccgccgagaagcaaggcacggcaaccgaccgactgaccgacgcgacgcgtctgaccagcctgccaggcaccaccagtcgcgtcccctctcttctctcccctctagcgctgaagccagcagcgagcggccggcgcgcgaacacggcgcctggctggctgactggccgggtgaagcgacggctctcccggctctcttcacccctactcttcttcgccgcttctctcgcgctacctccctaccctggctcgcctcccagctcgccctctcttctcgctcagcgccaccctcgctccgtccacccactggcgatgtctctccgccccccgccgccagcccactcacgacggtgtgagagcaggacaagagggaggagggaggggagggcctcactccgaaagggatgtcgagcacgagatagtacgcctcgtaaaccgccgccagcgccgtccctcctccgagctcaaagcggagcggcacgcctcggatcgttccgagctcagccgtaaaccttgcgagcgatgcggggggcgggaaggccatggcgaggaaggattggaaggtgaggaagaggaggggaacgaggaggacgtggatgaggatgttgccgggctctgtcgagagtaggagtaggggaggagtatcagtggtggagtgattggaatggagggagggatggacggactcgagtggtaggctccactatgggtttggaggggttgagaaaggggccgcgagccggcgaggagaagggggtgagaggtcagcccttggcgagcaacagagcgagccaggcggccggccgcgagctcgcgagattctctctcgggaggccggctgagcacccgacggcagagggcgagcagggttggagggacagactagaagccgagctgatgcttgaggtcaaagaggcccggcatggcaggcagggcggacgagcaggcgagtagctaatcgaggggcgttggagcgctgagcagtgtcgagcggatactgtcagctgcttctttgtatgcgagcgagttgactgggaagcagacggactgatgatggtggtgatggtggtcagtggaacaagggtcggtcatgctaaggggagatgggctggccgtaaccctaactcctggcggccgaggctcgagacgcgttccctccgaccgaccgtctgctcgaccctactaacctcctcgtacccggctccaatgccgccctcggccacgacccctgccgccgccaacaggaagcgcccgacacagacgaccgtcaatccaaactggccgcagtatgcgtgctcgctcacgatcgtcgtcgccgtcctggccgctgctctccgctacgtgacgatcggtcaggccattctcagtctcgctgatgaagaaaggacgcaggcaggcaggcaggcaggcaggcaagcctctcgtgccggcgtcgtcgaagggggcctctgctggtagcgcgggcgagcagacgggcctcgtcgcgtgcttctctacccacgcgcccctcacggcgcgcgcgtccgacctcagcctctcctcgtcgtcctcttcttttcctcgctagcgtgcccacactgaacccccgctccctttcggccaccagactgggatgatcgcaatcactgcaaggcgctcgtcagcaccggccggtggatgacggacgacttcaagagctggcagccggaaggtgcgctccgcgtccttgcttccgtccgcccacccgcctcgcctgcccttccatactcacgccccccctccccactcgttgtgcgggcacaggctgcatgacgcaccaatacgcgcccaagctcatcacatcatgcctcggccgccgtcggctcgtcttcctcggcgactcaaacacccgcgacctcttcttcgccatgacggccgcagccgacccgaatgcgcctgcggcgcccgacgacggcgcgaagcacaccgacattagctggagtacgcctgggggcgggcccgagttccagttcttctgggatccgtcagttcccacggtcgagcgcgagagcggtctctctatttggtgtataagagacaggggttagacgaagacggacgacggacgacagacggaaaggaaaggggacgacgacgacgacgggcggcacacccaattctggctccagcccccatcatctcttgtccttccacacgagcaggagaggaggcaggaggacttcaagcgaaagcgtggcacgcactcgatcagactcgagcggaacgcccttagctcgtccgacggtaggtcgagcggcgcccagtcggctttaggcgaggtgagcatgcgggcgggggtagatgctggttgctgggtgtggcggtggtgttgtcgggttgttgagggcgttgctgcaggctggctgaagaaggagtcgagggctgagggtcaagcaagcaaggccagaggcgagcccgaagcttccgacggcttcgctcgctcgctcgaaccgtcggccccggcccggagcggctcggcagggctcgaaagcggccaaccgccgcgcccgcccgcctgcccgcgcaagccaacagctgacctgccgtcgtctctctttcgcgcgtctccatccttcagtcgcgaacgacccttggaacgattgcgcggatgttgaccatcgccttcgttcttcacgcccggcatttcctcctcgcccagttcgccactcgcctatatttgaccggtggagagttgagcttttcatcgagcccacacacccgcccgccgcggcaagtcgatcagccgggccggccactgcgcacccaccccacgcacgcagaccgcccaccgccggacggacggatggccgggcgaacgaagagaccgacagaaggacggtcggcggagtgaatgcagaattgattgaggagagagaattgtgaggaggagtgtgattggatggcgagtggggcggggaggggtgatatgagaaagagagatagagagagagagagagagagcgatggcggagggataattgaccggattgggaggcggttctttgtccggtcgcccgccggtagggagcgagggagtgaggagggaagaacgaacgactgagggggcgaaggggcgaggagagcgagaaagcgacgagcgaggaacggcgtcgacgagcgaccagacggcgaagggtgaatgagagcgacgagacgaccaggccgccgaccaccagccgggcgaacgacgagcacccgtccagccagccgaacagcgaatcgagagcaggctagaccgacgtccgcttgtacttctgttgggcccggagccacttgcggtaagccgagagtgagtcgatctgggcgagcgagcgggacaggcgggggggaaagggagtgagcgagcgagacggaggggataaagaggggttggcctgagattgagagaggccgggaggaggaggggggaaggaagtagagcaagggggccggtggtgaagggagcgagcgagcgagcgagggttgacgctgaattacgaaagcgaagagcgagcgccgtcgaccacgacgcataatcgagggagggacgacgcaccttctcgccatagtagtccggcagcggatgggctgacgacgagagcgtctgcttggccggatcggcccgattgcgcttgacgtgctcgtagaagctggggtttcacacgacccgcacgtgcgcgcgtcgtcgtcatcgtcgtcagctttggcaagagatagcggacgagaggaaggagaggggggccgccagcgccgtccttccctcccgtcgcgccgccgtccccccactcggccctcctcacgcccatcctcccgccctcgcccagccgaaactccgtcccatccatcaccctctcggccagatcgaccgagctctccttaaagtacatcaccaacgcctcgccttttggtttgccgtcggcgtcgacgtaaagcttaatccgtggctcgtcgtcagggccgaggaggaggatgccgcattttgagaagacggaggcaagctcggagggagtcgcgtcgagcggaagaccggtcacgtagaccgctgtcgactttttaggcgctgctggtgctggtcctgctgctgctgctgctgttgaagggtgagcggtggtcgcgctcgagcttggacccgaaccggacgctgcttcggccgaggcgtctactccgttgaccttggccctcttcacccctttctttccccccttcccacctgccgtagaaacggcccccttgccagccgtcatactcccgaccgcactcgccgctaccgccgtatccgacgtaaagtcgacctccttcatcgcgcctgcggacgagccgtccttgcgcttcttggaggtccgggcgataagcgctgcgacgggtgcctagtagcggtgagcagcggcggacgggaacaggaaagagggagggccgtcagctaaagagggggtggggcaggaaccgggtgagggtgtgagaggcataggtggacggaccgtctcgtcgacgccggcaatcgagtaggctgcttgctgggcgcggatctgatcgtccgtcagctggcaggcggacagcagaagcgcaggatggtcagcttgcacgcccagacagacagcccaagcccgctctctcgagaaagccaagagcaagcgagagctaggagcaaggagcaagaagaggagaggagaggagaaggaggaacgcacgaccggcacccaggccctcgcaccctcgttaaactcgtactcgtcgcccgtctcgggcgactcaaacgtccacttcttgctgaccgggtcgtactggacatttgggtgcgaaagttggggctgctgggaggagggcagagggagggaggacatgctggtctgacgggagggtgaaggtgaaggtggacgcgacgaggcttcgaccgtctgacttgcacccccccccccctcgtatccgtacgccatacttcgacgacctcatagaccgacgtgaggcaagagcctgttaagagggccatctcggattgcaaggtgctgaccctgtctccatcctgcctttgtaacagatagcccagctctcgctcctcctggccgctcgccgaccgaccgaccgaccgacgcgtcccttctccccgccccgctccctcatgtcgtccctctacacgccctcctcccttgcaaagcccaagcgccggcccgtccccgcatccggcaccaccccgcacgctcacgcccatgctcaacagcagcaacaacagcaggtccgcgaactgaccgacgaccagcggctcgagatccgcgaagcgttcgatctgtttgacacggacaaggacggctcgatcgactaccacgagctcaaggttgcgatgcgcgctttagggttcgacctcaagaaggcagaggtcctgaagctgctgagggactatgataaaaggggcgagggcgtcatggccttcttgtcgttgctttcacccgcgcgcgcgtgtgcgcaccccttttgatcctttgttgtaaacccgcccccttcgctccggcccgctgttcactcgcacgcctcaaacgccctgcccgatgatgtcctcccctgaacgacggaccccagcagacccgaacaggcagacaagacagggtacatcgagagatagcgcgacaagatgaggccgcgattaggctacagttgggcgcgagaacaggcagcgatgacaagaagcaaggaagggggggaaggggacagggatgacagggtaaaccgaatgatgtcgagcggaggtctaccacttccagccccacttccgggggctcgcgaccgccggcgccgctgctgctgagctcgggccgccaacgaccgggccaccccccccgccggcctttccggcgccgccgacgggcgagctcgggaagagcgagggcgcgaggacggcagcggcgggcgagcctggcctgccaagaagagcgtttccgactgaggaggttgagaaggtgccgtcggcggccatcgtcgggaaccgactggccggcgtcggttccttgttgttgccgctgaagaaggcgccgagggagaaggcgttgctgaagggtgaggttgaggaggtcgggggcgtcggcagggggcgcttctcagccgacgctgccgctgccgctggggccggggccgccgacggctgctgctgctggtcgaggaggccgagcgtgcgtagcgtcgaggacgagtcgttcgaggggaacgtaaaggacgccgccagaggcgcgtctgagcccatgtgtcgctggtactcgtgctgatacgttcgctgctgctggtgctggaggggcgcaaacggctcgagctcgtcgagccgcatctggctccgcgagcctcccgacccggccgatcgatgcgatgcagccgagtagctcgacgccgctgacgaccgggccgacgacgatacggcgcccgatccgggccctccggcatagacgagcgtccgcggtcgggccgcgggcggagggggcgagcgcgagcctttgcgccgcttcggggcggacgcgccggcgcagagggcgtccgagacgaggagcgcttcgagcgcggcggcgctggtggcgggagacggcgagccggcgtcggcgggtcgtccacaagcgggtcggggggaagcggcggcggcctcttcgaagagtgcagcgggcgagagacgcgatgcgtatgcggcgtttccgagcgcctttggcccagcagcgacagaaggcgacgaccgtgtgcgctggtggagaaagcgggccgcagcgccgccggcggtcgacgagaaggacgcggagcgccgcttcgcggccatggctggagcagcgagggtgggccgaggcgagcaggcagacagggggggaggcgcagggggcgacgagcagatggcatctgcgagcgagcgcttgcgggcgtgcgaccggcccggaacggcagcggcggcggcggcaggaacgagaggcgccggcacgccgcgcggcgtaaccgacaacctcgggcggcctgggccgttgctgccgaagaacgccagcctaggcggcgtgcccagatccatcggctcggccgccccctcctcccctgcgcgcctcccccccgccgtcggccgagccgggcggggcgggctctgcacggccgctcggccccgtcggaggcaagtgtttactcgacgggagccgagcgcagcgcgtccgcgccccgactgtcggccttgtcctcctcgaccgccatctcttctcgccctccttcctcgatcaacgatcataccatgacaacgatgtccagccatgctgccgctgtcagtccggcgtcattcccaagtcccccgtcgtacgtccgtcgaagctggacgcccggctctttagctaagggtcaggtcgaccagaagctactcgctgagagtccagccgttcccccttgcccgctgctcacaggcagactgcgtcgcaggacgagtgctgggcctacctgaaggcagcactggacatcttcatggacgaagggtgcgtcaagccgactcgaacggccgcgtgcccgctctcgacctcgtgttccaagctcttctgacctccagccggccgccagctgctgatgctcctgcccgctcgctcatccggcaggccaacgtacgtctcgactctcaactacatggagctctattctgcagtgtactcttacgtgacgcggatgtcgttcccaggcgagcagaggcagcgtgagtagagtccggcctggctgtcgctggacgtcgtgctctgacgcccatcccatcctttcggccgccaatggaacttcacggcggggcgcaactccaggtcgagctcatcgactacttcaaagcgcgggtcataacgatcacaggagtgagcggtccctgctgattgacaagctgtcggcctacacgactgatcctctggacccgaccatcggcagtcgtgtgagggcctgagcggcgacgagctccttcacatatacctttcagtctggaccgtctacgtcgaccgatcgcgtacggccgaccgaatcttttcgtaccacaatcgcaattaccacaacgaccttgtcatccgtcaagagcgggttccgttgtcgccccacgcccagcgcgtcttcaccgtgagtcccaccgcgctcgtacacacttcgcttcggtcgccgacagtgaccccaacttggacgcgctatcgaagcttgctctggttcaatggcgcacctatctactgctgcctcttcagatgcctctcaaggaggccctcctcgatctcgcccgccgcgaacgccaaggtgaggaggccgagtgcgcacttctaaaggacgtcctcgagtcgcttggtcagtctctcgcatctccttcgaccctcgacagacttagaaggctgacggtctctcacccctttggtagtcaccctcggccgcgagacggccaaggcgaccggctcgtccgagctcggccgatacatggccctgtttggcgaagctcacctgcagtcctgccgatccgagtgcgaggccagggccgaggcttcacttgctgaaagctcgacggccgactacatgcggcaagccgagacctggctgcatgaggaggaggctcgcgtagagcgctgcctgcctgaaggggcaaggaagagggtgggtcatgtgttgtgcttttcctgaccatgctgcgctagtcgccacgggtactgacacttgcctcgtatacgccagatcatcgccatctgggaggatggcttcgttcgcgcacatgcagaccgactccgagcggcgtttgagcccctgctcgctggacagaagatgcgcgagccgtgccgatggagctaccaggcatgcggcagacacccgaggggggggggaagaggcaagatcagccacgtcgtgctagcccggcgatcattcccgtccagcccagcgcggggaccaacagggtgtgccaagctattagaggaagagggaaatggaggaagggggaaagggagggagggggtgggacgcacgatagaaacctgatcgaccatccatccctctggcacggcgtaagatggcgcgccccttgccggacggtagggcgcatacggcccgagctgggcgcaagaacatacgagcggaagaaagaggtcaggcggccgtcgatcagcagtcgacaggggtccgaaaatgggcagagggagatagggaggagcagagagacagacctgggcaaaaacgggcgaggccacccacgccggcggcggcccgtcctcctcctcccctccttcccgttttccaacccgcaccaacacggcccagccgacggcgacgacccacagcgccaagcaagcgaagaacatccggtccaacttgcccaagcggcgggccaggcgtccgagccgggccggtcgtatgcgggggagactgctgctgttggctgaaggcgccgtcgggggcgaggctgctgctgcgcgacctcctcctcctcccctcgtccaaccgtcctcctcgccgtcgtcgtcgtcgtcgacggagccgtacaccgagctgctggtcgccggataccgggagggtcggacgagcgccggcagcagcatcaagggttgtttttgcgcgctcgcgggcgccgagcctttaagcagcgcgaacgagggcatcgtcctccgggcagagcgagctgcgttacgtcaaaggcatggtaaaggagatcagccaagtcagttttccgtctgctgctcggcctcttgcgaaacgttcgctcgtcggcttccttcgtttggaaggtctttaagcagacctgttgtgtgcgtccactgcgagagctacgcggccgagcgtcgaggagcgacgacgcgcgcggtcgtcctcacatcgagcgtcaagggcttaggccggggccgtccgtccgacccctgagcccgagccgagctcgctcacccgcccagtcgaagggaggaaaaagagaacgcacgatccgtgtccgttggcttgcgagattgctcgaacctgcctgtctggctttctgcccttctagctctctcctggtcacaatcagtcgtccctgtcgtccggtcggcggtctcccgcggcccctacccgcctcgaccctcgccggccattcaaccctttttatttcttttcccccctgctcactcgctcgctcagacggacggacgcgccgggcgcctgctcttccctcgcgcggcctaggcttcgagtcggtcaacacccatccatcctccctcagcacagtcagcagccctcgccgcaagagccggaagagcatcccgcccgctagaagtcgggatgagcgagtcgatccgggtggccggtccgtccctcctcctcttcgtccttctcttaaggcgagcgctcaactgggagcagcgggcgggatgctcttccggctcttgcggcgagggctgctgactgtgctgagggaggatggatgggtgttgaccgactcgaagcctaggccgcgcgagggacccccccccccttttcgcgtgccggtagttaacatcgagtcgacggggatgtacgcgcccgaggacctcctgcccgaggcgatcgacgtccttctcggcaagattgacgccgtcgagggctgcctcaaggagctcgagggcgggctcgtgggcgcggcgcaggtcgaggcttgattgtaatgaggcgatttgaagaaacgagagacgttcccaggcaagggacacatgcgatttgaccgaatcttatcggaccaacaggaaactttacctggctggtcgctcaggactagtggagacgcaggaaactagtctgccggcgatccggtcacagggacggccggaaaaggacgggaagggtgtccggggatctcacccctgcgcgggccgaaaaccttttgtcgagatcttatgggatcgctacgagaccggtaccgccgggttcctacaactcaggagagattgaccagacttgtctggaggaccagacttgtctggtcagacttgtctggaggaccagacttgtctggaggcgatccaatcagatggtggccgactagccaaagtgagcgcgcgcgggtcccgaggcgcaggtcgctgggctgctgcgcccgcctgcttcgccatgtcgcccgcccccttcctgcctgtcgacgaccaccatcgatcctgagagcagcaagagtgtcaagagtgtcaatcctgtccacgctgtcgtcgtggtccgttgtcgatgtcggcagggaaacggaatcgccgacgctaacctcttcccctcgccgcccgccgcagatgactagcctgagttgcgcattcagacgacctcgctttcgaagatggacttgcagcgcagaggtccccaaccttgctcgcgcaaacaacttgacatcagctcgttcgcttgccctctttcgtcgtcgaccgctagagccagacgcacgtcgtcgtcgtcggcaggtcggcaggtcggcttggcagctgcgcgcctgccgacgttagtcttgtccctgcttccaccatctctttctcgaccatctcccccttctgcaccctgccagcagactgcccaagctcaaaagctcacttatcagccctgctcgtccgtcagttcccttctccaccgactgttgcgaggttgcatggaggaggcagaccggcggggctgtgcctgatgctcccggcctcgagctgacctccttcagcccctcctctgcatccggccgctcgctaccttccaacagacgccagcatccattccagaaagaactatgtctgtcctcccggagcacttccagaagctctcgctcgactctgcagccggcggcggtctcaccgacccgaacgtccaagccccgtcctccccgcgcctcaccctccctcccacctcgtccgtccgcctcttcctcgcctctctcgccatcgacgtcgaccgcctgctctctcccgaagagcaatacgtcgtcccgcccaaactcgacacaagtcacaagctcgtcgactactacatctcgtcgtcgcacaacacgtacctcgccgcgaaccagctgacgggccggtcagacgcgagcgcgtatgcgtcggtcgttagtctcctccctccctcaatggcgagctctccggcagtcctgaacaccctcagtcgcctgtgccccccgaggaggagggcgaaagggaggaggaggtggaagagggtgcggatgggagggagaaggaggaagagcttcatgcagagagaaggggggatcagcagaggataaagggagagaggggcgaacgatgggcgaggacgtacacgccaaacgtcgccttggccagttgtgatcggccctagcgtcgcgtacccgccctcagcgagcgtgagcagcgcaatgctccagagcccaagaggtcgccagcgccgcctctcgccgcgcgccgtcatgagcgcccaaaccagagccgggccgagcagcaccgtgctcgcgagcgagaggaggtggaaaagcgtgtagtctgcgagcagcggcatgggcgaggaggagggaagcgtgcaggcctcgcaggcgagcagcggcgtcgggccgagccgagcgtaggtcgtccgtgcgtcaaaggcatgaagcttttggaggagtgccgggtgggcgggggtgagtcgctgacgtaaggcactgagagggacggcgagcagtggcaggccagcgagcgggtcggtctggcgcaggaggctgacgaggtgtgcgagggtgacggccgcatggagggcgagcaggaagagctcggcgtgcgtgagcgccggagcgggaagccggcgatggccacgtggccggaagaggccgaggagccgtgggaggaccgagggaagaacgacgacgaggccggccgtcaggagcgacgtcatccaggcgggcgagagggttgagggcagagagggttgagttgaaaggcgtcgtcttgggtcgcctgcgcgcatcctgctcgatcgcctggcctcggtcgctctgctgctcgatcgctcctttggcttgtctttcctcgcccgccgccgcctctctcttccgcacccacaatatccagaaatgagcatccaagagcagcagtccaagcagcagccgttcaagacggctgacgacgaggcccacgaccggctcttgcaagaccagcaggcgaggcagatgccggtacccgagccggcgcagaaccctggtcggtcccctctcgagcgcgccgcgctgtttttcgactaggacgacggccttgaaggagagaggcgagacggggagggcgtttgcttgccgccgggcgagtggctggccaggccggcttgggcagtctgctcctcctgcgagacccgcgacgctcgtctccgtctggacgagtgacggccaaggaggacgcccgacctcgctcccctcccgcctctacgagacactctctgtgttcgacgcgcccgccatcccttcgcttcttcgctcgcccttcgcatgcttccttgctgagaccctctctcctcccgcccttggcagcctacccgatcctcgcttactgcggcgcgtccatcagtgcgttttctcttcgctttgggccttaggtaggccggtctgctcggccctccttccccggcgcgtcggacgcttggcctaggcggggtcgagcggcacaccccagccagtagagagcctcgagctgatcgcgctccctttctcgctctacagccatgacgctcgtcaacaaggcgagtactctgaactgagcctccgccctgtcgtcagccgaggaggcgggagactggcctcccgagcccttcccccccctcctctggcgccgtccgggcgcttgaggaccttatgcacggcgcgtcgtcctcagcgccgtcgtcgctcgctgatgatgacgccggcagtggcggccgaggacgacggctatcatcgggctcgacgtcggcagtcgcttcctcctcgtccgccgccgccgccgccgcctcctcctcggcagcagcagcagcaccggccggagccttccctgcctcctcgtccacctcctcctcctcctcggaccccaactttgtctcgcgcgtctcctccctccccgtcgtcaaccccctcctgcgtgcctactcgaccgcaacgacagggagccgcgttgtccgctacgtcgagggcacgctcggcgccgttggcgggagcttgatcggcgaggaaaggcgggcggtctgggacgagtggggctgtcggacgctcgatcgcgtcgggctcgggtccgcgagcgaggaggcggcttttgggggtggcgagacgacgcgcggcggcggaggaggaggaggaggaggagtaggtccagtcggaccctctcccgcacgcgccgtcagcagcagcagcgtccttgtcgtcgacgttcacccccacccctcccaagcctacacaacctcgacagcctcggactttgcgcccggctcggagcgggccttcctcgcgcgctcggtcgcatcgacgacggccgggtcgtcgcgctccggctcggcctcgccgccttcaacccggaggagctcggtcgagcggtatgggaggctgctgccggtcggaggtgcgtcgtcgtcctctgttcctttcaccgggcctcggtcctacgtcctttatcctggaagactgacgcgtgcgcttcccctcctcggacggctgacgacaagacgcgacctcgctcctcccaacgacaagaacgacaccgacctcaacagccgccgccgcgcaccggccgcccgccgctggcgccggcgccggcagccgctggtcaaacatgctcgtcgaggcgggcatgacggccggtgggatcggcgccgccgtcagcgaggagagcatgaagagcctcaagtactgcctccaatggctccaggtccgtcccctttgcgctcgtctcccgcccccctctccgtcagtctcgggatactgatcgctcgcgcgcgcgtgtgtgtgggagagcagtacgcgacggcccatatcgaccatcagatccacctcctccgcgactttcttgagaccctctcgtcgccctcgaccccgcaacacgccctcatctcacccgcggcgctccacacgctctcgcagatcaaggccgacgtcgtcgagacgatccgcaaggtcgtcggcgtcgtgtcgacgtatgcgggcggggcactgccggaggccgcacggaggagggtcaaggggcttgtgttggcgttgccagagaggtgggcgatggccaatcctacgtcctccggcagcggcggcggcggcggaggaggaggcgaggaggagggggcagaccaagggccgacgatcgtcgcggccaaggcggcgacgggccgggtgctgagcctcgcggttgaagggctcgacatgctcagcggctgcgcgagcatctttggcgagagccttgagcgggccgagatgtgcgttctcccctgttcctctctggcgatctccccctgtgtgcgcgccgccgcggcccacggcgacacttcgtcgatcgccctttcagcccacgcgccgaaccgctcccgctcggccagcccgcctcccttcccttctcttcgtcactgacgcctgattcttcctcttccgccagactatattgccgaccgcgcgacggcgacgatcgcttgctcgtcccagccgacgccggccgtgctcgactcgccgccgctcgacggcccccgcctgcctcactcggcggcggcggccacctcggcccgatcgacctcgccctcggtcgtcgcgaccctgccgtcgctcgaggccttcatcagcgtcctcgtccacgagtccaacgtccaggtgccgacgctcctctcgacgctcgtctacctccaccggctaagggaccgcttgcccaaggtcggaaccaagggcatgccctgcacgcgccaccgcgtctttctcgcaacgctcatttgcgccgccaagtacctgaacgactcgtcgcccaagaacaagcactgggtgcgtttgcacgaggacctagcttgctcgcctctaagctgaccagcccgccctgccctcgccagtgccgctatgcccacctcttctcgcaagccgagatcaacctgatggagaagcagctcctctacctgctcgactacgacttggccatcacgaccgaggaggtccacactcgtgcgttgtcccttctttgccatagaggcccgccgctgacgtcggcttcttctccttgccgcagagttcgcgcccttcatggcgctctaccccttcccgccccgctcgcctgcgccctcggtcgtcgaatactgctcgccccgctcgccggccgtcgccctgcccatccgcagcagctcgcgttcgttcgcctcctccggcccgccgccgagcgcgttcgacgtcccggcgctcgaccgttcggcctcgacctcgtcgcttgactcgaccgactcgtacctgcccgcgacgcccgactcggccgacgccgacgactcgccgatcgcccggccggcgcctgtcgcccactcttcgtcgtcggcgtttgccaagccctccacgacggccgtcggcggccggcatcggctcccttcgatccgggcgctcgcaaagccgctcgaggcggtccctcgcacgacggccgccgtccagcagcgtcgggagcggctcgcgagcacgtcgcccgtcgcccaggccgccggagggaactttctcaaccggctcctccgctcggcggccgaccacctcggctcgccctcgtcggccgcttcgctgtcggcgagcaaaaaggccggcgccgctcgaggctcgctcggccgctcgagccgacgacccgccgacgaggtcctgatcgcgggcgcagagctggactctgcctcgtcgtcggtcgtcatcctctgaggacgagtcctccaattcaaaatcaaaaacgacaaagacggtcgcttctgccgccgccactcgcatctctctcctctcatcactcggtcttgctcttgactcactcacacacgccctggatggcttgtcccactctggtctcgcatctgttccctatcccctcccaggcgccacccccccagtctaccctatctcgtgcactctcttggtctgtctttccgtctctcacgtctgtccggctgggagagtgggggcttactagtgctcccatccgagaccttccgttcgaggcgcagcgcgaagcgaagcggggcaggacggggtcaagcgtcagagtcccacgcgccacagcacgggcaagtcgggagagggaagggggacgcactctgcatgatgcctatcgagctgtttcgccggcgtgcgaagagggagagggacgggtgttagatcttgcgacgggcaggcgggcgggtaagcaacgcgtggccttcttggctggttggctggactggccgcttgtaagggagcgaagccggcccaggcaagacgaggtgcgatccgttggagtggaagtgaagagggggaagggaagaagaattaggggacgaaccgccactcctgctctgaaaggatacgcaacacgccagactcgcccggctcgaacatcctataccctcccggccgtaacgcaagccgcgcacgttcagtcagcctttggcacgccctcggcgaggcgagagaagggcgggggaggatggaaggggaacggacacaggcgggatgagcttgaggagctgcttagggaggatgacatgcctgtgcaagcagcagccgagtagagcaagagtcgtcagtcgaggagctcaagagctgaaggaaggaggcggagctggtgcaggctattgggcgagcgagcgatttgagggccgctgacgggccgcccttgactgctcgctcgagcgtgggcgagtgagtcgagaaggaaggggtcgagaggaagcgccgtacctgtactcgaactcgtcgtcctcgtctacccaaggccaagcaagcaagcaagcgcgtcagctccgaccgaccttccgcggcccccacgagcccaaagaaggagagggcgagcaaagggaaggtggaaccgcacacttgtcgctatagaagatcctggcgatcgcgcacgaaggaagaagtcagtcctctttgcttgcctggtcgaaggccgagtcgagccgagggcgaggaggcgagtgtcgcgtggccgggtgggatgggctcagacgacaaagctccgccccctccccctcgcctccaagccgcgcacccccctcgagccaagataggggacgcacttgtcggtgagctcttcgtatgagaggttcttggacatgctggcggcagggaaggggggtgaggggtgagagtcggacggacgacgcgtgggcgagagggcgaaagagacgcgcgcgcggaggccgatcaacaggcgcttcctttcgctcggggcagaaaggcaaaggttgtaacaatggaatggagagccattcatcctttgatcgtggtcgacaggccctgctacctggcttcgttcggcctctagtttgattgactcgctcgtctcctctttttcaccgtccgagccgacgccaacccgccccttcactccccctcccgcttcccttcgtttctcctcccttcctcctcagtccttccgtccgtccgtccgtccgcgccgggcgacctttagacgcgcttcttcccgctcccaacgacggtcggccggccgctgctgccgctgccgagggctttacgccgctgaacgtgcatgtacgtgtacatgacgtagagggctttttttttgccgggggatagatgatagagatcgtcggtggtggatcggatcaggtgacgatcgtgagacaccaccaccagcgccccttcgaagtcgatcaacgcttcggtcagcgcctggcgcatgtcgagatccaggtggttggtcggttcgtcgagcagcagcaggttggggcgctgccggacgaccagcgccagcaccagccgcgctttctcgccgccggaaaaacgttcggtgggctcggtcaccttgtcgccccggaaatcaaaaccgccgaggtagtcgcgcaactgctgctcggtttcccgttccgccagccggacaaggtgctgcaacggcgattcgtcggggcgcaggaactccagttgatgctgggcgaaatagccgagacgtacgcctttggccaggccgatgtcgccgctgaacggctgaagctcgcctgccagcagcttgataagcgtcgatttcccggcgccgttgtggccgagtaacccgatgcgtgagccgggcaccagattgagcttgatggagtccagaatcagccggtcaccgtagccagcgctgactttttccatccgcaacagcgggttgggcagcgcttccggcgcccggaagctgaagcggaacgggttatcaacgtgggccggggcgatcagctccatgcgttccagcatcttgatacggctttgcgcctgcttggccttgctggctttggcgcgaaaacggtcgatgtagtgctgcagatgggtgacccgttcctgctgatgctggtacatggcctgttgctgagccagacgggtggcgcgctgctgctcaaacgaggtgtagttgccggtgtattcgaacagggcttcctgttcgatatgcagaatccggttggcgatcgggtcgagaaaatcccggtcgtgggagatcagcaccagcgtgccgggatagcttttcagccatttctccagccagatcaccgcgtccagatcgaggtggttggtcggttcgtcgagcagcagcaggtcggaacggcaaatcagcgcctgcgccagattcaggcgcatacgccagccgccggagaaatcgctgacggaccgttgcaactgttcctgctgaaaaccgagcccattgagcaggctggcggcgcgggcttgaaccgaccaggcctgaatggcgtccagcttgccgtgcagggtggcgatggcgttgccgtcgttgcgggcattcgccgcgtccagctcggcttccaactggcggaattcgcggtcgccgtcgatcacgtaatcgatagccgaccgcgccagcgccggggtttcctgattgacccacgccagcgcccagttttgcggaaaggttacgctgccgccgtcggcgctgatttcatttttcagcaatgccagcagggtagatttaccacagccgtttttacccaccaggccgactttctgcccagggttgatggtggcggtggcattatccagcaggacgcgcacgccgcgacgaatttgtaacgaggagaaaacaatcataaggcgccgtatgttcagactatgttaacttatcattatgataatgtaatgtatgggcgagctgccgcaccgggcgcaatggtagcccaaaacagcgactatacacaaaaaccataccgggagggggatgatgtccccccccccccgaccacagaagacgactttgcgacgcagcgcaccaagtccgagacattcctcggcgggacgccctggtgagcgcgacgaaacttgcgacgagggtcgaccaccaacccacttttcccttcgctcgacgtggcgcccctccgaccttgagcggcgcacgtacacggactctttttcctctttggaactctctcgcctcgagtcttcctccatctgtcatcaattaatctctggcattccctaatcccctctctcccgccgtttgaacgctttgccggtggtttaagaacctctcctgccagctcgcgaaaaagcgagtgaacaaacgaacgaacgagcgagcgatgaccctcatgaccaagcgcctctatcaaagcgattcgtgtgtgcttgcgccctgcggttgccatgtcttccctgcttgccaatgacgagcgaagtgtgagcctgtgattgagcgggtgaaaacggggcgagagagggcatgacgacaagaagggcggacacggggggcgggaaaggggagcgagaaagagaggtggaggacggggaacaacacgggcgggaggaaaggcgagaggaagagacgaaaaacgaaggaacggcggcggaagactacagacggacggacggccttgtgacttgtgaaggagggggaatgtacagcgggcgaggggagggcaaagcgtacagagggcctggcgagagtgagagtcgggaatcggaagcgaaataaagaatagagacaaaccggccgaccgaagcgagggtcgaacagagcaggtgcgaggcgggtcttgcccgaagagaaagggccgcgtcggacgtcgggtaggggtaaggctcggctcggttccttcggccaggtcgactgagcgagtgaagacgaccaagtggcctaggcgtcctgcttctggttcatctggcccttctgcgtccggatccgtccgtgtagagtaggcgagcgacgaaagccgaaaagcgggcaggcagggggaaggagtggagggaagtcagtctccgtcgccgtcccccaacaccgctcgtcaaacccccaaccagagaggagaggaaggacgtacgagttcctcctccctttccttcatctcccgctcgaccgactcaaccttcttgtcgagctcggcccggagcgcacggagctgggcgagctcgcggtcgtgggcgaagcggccttcggctgcgcgctcgcggtcgctgtcgaagggagagggagagagggggggaaggggcttggcgcgtcagccttgcgcgcgcgcttgcacgccagccgtctgcagcgaaggctgggaagggggggggggacgaacggaggagacagttgttgcacgtgacgagcgagttgagtccggccgtcgtacagagagcacgcgcggtgcatgtgttgctacgatgggtgagagggcgaaggggggggtaagcttggggcgcgtgtgctttcgcgaggctgaggcatgctggatgggagcaggggttgctcgctcgctcggcggggattgaagacgacgtacttgctctcgcaggcctgacatgccgacgacggagggccatcaagtcagccctgctcgacgcctctccactcaagagcggcggggagggtgtattacgaggagagggtcatgccgttcgtccctcccctcctcttctcttgcaaccgggcgcaagggggacgggggggctgacacgccacatgccccttctcctcttcccgtcgctcgctcactcactcactcgccccgtccgctctcgtagctactcccctcccgagctctacgcaatcgtcgccgacgtcccctcctatccctccttcctcccattcctcctctcgacccgcatcctccccacctctccctcgaccccgcaccagatccggccggacgaagagtgggaggtcgacgcagagatgagggttggcttctggggcttccaagagggctatacgagtcgagttcgggggaggccgtttgagagcgtcgaggtaagcattcaggttcacgctgcactttcagacttggctgtgctgtgcgtgcgtgcgtgcgtgcgtgcgtgcgtgcgctgatgacccctcctcccccttcctcacttgtctcccgctggtggcaggccattgcatccgagacgccgctcttcaagacgctcgtcacgacctggtccttccaccctttgacctctccttcctcgccctcctcttcctcttcttctcccccctccatcttctcctcacccctttcctcctcctccatttccaaccaccccccgccaccatcgccgtctccgtcctcgccgcctccgtcacccgccagcgaccctccttccccgccgacgtcgacccgcgtgtccctctcgatccgctacgccttcaacgccccctcgcacgccgccgcctcgcgcgtcttcctcaggcgcgtcagcgggctcatggtcggagcgtttgagaagcgtgtcgaaggggtctacgggcggaggaaggcggccgttcgaggggaggagagggggatggcatgatgctttgagtagggttgcaagtgcgttcttgagccggggtcgggagagagggggtttttacattccagaggagagaaagacaggagcgggggttggaacagaacgacccaaaaaggaagcgggtgaggaagccgaagagtggagaaggaggaaggaggatgaggccgaggctgagcaaagggctaagctacaagcggggacgcgggctgaacgagagaaggctcaaagaggggccaggggggagggtgtgtgtgtgtcgtcggcctcctccctcagtcgtcgtcgtcctcagccggcggcccgccgagcgccatcatgttgaaccggatgttggtcgggtcggccgcgatgtagtgctccttaatgaagcgcgctgcgtcctgcaagtcgcaagcagcaggagatagaagagagatgccgttcgtcaatttttgagggtcgaacaaggagggaagagcggcaacgagcgagtcgagcgagaacaggacacttaccaccagcagatcgcccgtcgtcaacacgccatggtcgaccggcccgttccgattgccattcagctcgacgagatgcgccctcccgttgacccttcgctcgacaaacgccgtgaaatgcaagtcggtctctgcatcctcgtccctgaggagcgcctggcctgcggaggaagcgtcgacatgtgcgtctgcgagcaggggggaggaggcaaggagggcggagccggccgagagagagagacgacggagcttcgggggagggcgggtcacgcccgcgagcgctcagcccggccgaccttcttctcttgttcccgtctttcgccctcgagcctgaaaacgtccggcgcgccttcttccagaccgtcagaccatgctcgacgcccgacgagcgtttgttcagacccagcccggcacgctagcactcgcgccgccgtacgacgtcggagggccggcgccggacctcgatcgccctctgtcggccgagccccttgaaacgccgctcggcgcgggatctccagagcctgccgctctgggcgaacaaaaggcgagcagacgaacaaggcgcccgtcgccctccgaccgcccccgttgtgccgacgtcgagacaagggaaggacgagagcgaccggcgccggtcaagcaggcgccgttagcccgacagacgacgaaagaaacctcgctcggctgacccctcggcccagggcttgcaggcctcgacgccttgacctcgacctcgccgcctgtcgtcgacccccttcaccaccaccgctcgctcgctccttcgtcgccagcagctcgcagctctcctcccatccaccatccaccagactcagcctcgtgtcgcttcggccagctctctccgcctttttaaacgtcccagccttcgtccccggcttcgcctcgccctccctccgcctgctcgctcgcctcgcctcgtcctctcctctctcgtctcgcactttcgtccagcatgggcgatgttctcttcattgtatactcggctttagccgtcatcctcctcgccatgtcctgcgggccgcacttccgagccggtaacgtcggagccattgccctcgtcggctggtgcatggtcttcggcatcattggcttcgtcaaccacatcatctacttcgactcgtacgaaaacctgacgccggtctggtgtgatatcggtaggtccgctcgctctgctgtccttttcgcctccaatcctgacgctaccttgctctgcagtcgtcaagatccagtcgaccgtccagacggggctcgctgcggcctgcctctgcatcaaccgtcggctgtcgattatctcttcgtccaaacgacttgacgccggtggctctagacggctctccttctggatcgacgtcgccatcgtgttcgtcccgtcagccttcgtcatgctcgtcagctacttcgtccaagctcatcggtacaatatccaagagggccatggctgcgtcccagcgacgtactgggagaaggaggccattatgggtcttcttgccgtgcctcttttgctttcgatcctctcctttgtttacagcggtcagtccggctggcatccggtctgatcgacgtgtcagctgactcaagtccatactgccaggactcgccatctacaacttcatctcgcagcggcggcgcttccagtcgcttctgcagcagaactcgccgacgctcaacaggagccgcttctttcgccttctggccgtctcggctttcgacatgctcatctccgtgccgaccatcgcctggacgatgtccttccacatcaaaaatatcgaaccgacgctgagctgggccgacgtccactacaacttcgacctcgtcttcaagctcagcgcgcagggctgccaaccatctcgagtggcccggcgtccctcgaggagcttaaaggctctcgagggcccgctcaagagctctgcctgacccgcttccttctatgcttgcttgcgtgcgtgcgtgaggtctgcaaagctgatgcgcaactcatcccgacctcctttcgcgttcgatctctcgattcccccctccgcgcctgtgcatacacctttcgcaccgtctcgctccttcctctcctcgctcgcttttccttccgtctcggcttgcatctcctcgccccctccacctcgcctcccttcgcatcgcatcgcatcgcccctgccgttcccgtccctccttgttctcgctccgccgcctcaccgcctcgcgtcgccgcccggcagtgggcttcaagcacatcaccgtcatcgacatggacacgatcgacgtgcgttcccttttcctcgtacttccgcttctcgctcaaaggcgcgcttggctcgctcggtctctgcttcgctctctctccgcttcatgcaccctgcagccccctccctgcaagcctccccctctcccgcgcttctctttgcccaccctctcatcgatcgcacgccctctcgtcgcacgcccccctgcgcctccctcgcctcttctcgtctcgccttcgaccaaccggacgctgaccttccgtttccctctcacacctcccttcccactctttgtaaatcatgcgccccgccatgcgtcagttgtcaaacctcaaccgccagttcctcttccggtccgtttcctctcttcctccctcccctccttccttcccccttccatctcgctcgcttgagctctccactgactccctccccccctgtcttgctgccgttgtcgtcgtcgtacagcgagccggacgtcgggaagccaaaagcgacggtcgcggccgacttcatcatggcgcgcgtgccgggctgcaaggtgaccgcgtgcgtctcctctctttttgttctcctcgccttcccttgcgttaacatacatacacacacccctcgcgcccgcctagccacttctccaagatccaagaccaccccgagtccttctaccggtccttcaacctcgtcatcaccggactcgacagtgtcgaggcccggcggtggatgaatgcgacgctcgtcggcatggtcgacgaggacgagggggaggagacgctcaagccgatgatagacggcgggacggaaggtgcgcgcgcgtcgcagcctgtcggccttcctctcgagctttttcgccctttgctttggcagtggactaagggcgggagggaaccctcgtccgcctgcctggctggccagagcggtcactcggtgttctgagccgctgactctgcctctcgcccttgttcttgtcttggttcgttaggctttaaaggccaggcgcaggtcatcctcccgaccatcacccattgttacgagtgcacggtctgtccctctctcagccgtcctgactttggttctttgactgcctcggcgactcgaacccgcttgctgactcttccttcttacgccttgcctctccttcgccctcttcacttctgccctgctcaccgccttcgccccttcgcccaataatcttcccccccctctcggccccctggctccacgctgaccgctctccgtctcatcctgattctctctccgcccacacccgcccgcggctccagactgagtccaagcaggtcgccgaggacatcgacgccaagtcggccgagctcaagcaggccgccgagcgcgaggcggccgacgcgcgcgccaaggctgcggagctcgaggcgaaggcggagaagaaggccgcggaggtcaaggaggaggcagagaagaaggctgcggaggtgaagaaggaggtcgggaagaaggccaaggaggtggagaaggaggctgtcggggtgcgtgctctttcccttctctctctgtggctgcgggttgaaggtgggcagctcgttagcgagcggagagagggcggtcggcccccagcgaccgctgccgcccgccggccgtctaaccgccgacgccgcccagccatacgtgcctgcgagaagcgctccggtctgactccagccctctcccaactcgcttgctcgctcgcctcgcagctctacaacaaggtcgctgccgtcgtctcgaagccccgcgtctttgtccccgttctctcggcccgtgcgtcctccattccttccccttcccttccctcaagcgctcacccctcctcgtgtctcccagtcaaccttgccctctttggcttcctcggcctcaaagtccaagagcagcgcaagtcgttcgtcccgctcgaccgccggcttgtttcgtccgtcgcgatcgcggttggcgcgttcgtcacggtcgagggctggtggttgaactcgtacctcgggaggtacgacatggacggcaagcgcaagcggctttagagccggaaagttgtgctgctggcctggacttctcgtttgcgcgctcctgcatgcctcgcttcgctcctccgtctcctcgggtctttcctcggcgtcgtgtgttcctcactccttctcctgaaccgacctgtctcctagccgttgctcgtctcgcccgacccccttctgtagctccctccgactcggatgaatacatacaacctcccatcaaatccggacggacgaagcgcatacttccctgcggggccgacgctgcgccttcaaacgtcggcctcagccgggccggcggaagctgactgacggtggctctagctggctgaagtcaagggtccgacgacgctcagttagtcagcgcatgaaccagaaggtgcgaggcgagcatggcattgctgttgttgtcgacgccactttgcctgctcgaccgaccgaccctcactcgctctcgctcagtcagcgccccctcccaacccccctaaaccctcatcttccccatccactctttcagcatgtcccccgtcgagattgccagcgtcagccaatggaacgccgccctccggcaagcgaccgcccagggccagacggtcgtcgtcgacttctgggcggcctggtgtgggccttgcaaggtgcgttggttgtgctctcgctggcttggtcgtcctctctcacgtcgtgtcgctcggttgggtggatgtcactctctttctctcgctaccggcagagccaacgacgtccacttttcgagtgccgctccctgcatattaaccctacccaaccccgggacgaagcgtccggcccgaggattgagaggcaccctcgaccgctcgcccttcccggctgcccccaatctctcccgccccaaccccctgtctcacacataaaggaaaaggcaaatgcaaagcgaaggaaacgcacggaagtggtcgctctcgtcctccttagccttggccgccggcttcttgtcgtcccgccgcttctttgtcttcttcgcgctctgccgcgcgcgcgcgagaagggggagaggagagcaagctatccatggtcagctcctacctcatccactctcaagccaagcggataagcaaagacgagcagagaacgcacagcagaagaagcggctgtcccttcggctttgaccgcatcgtcggcctcgcgccggccctcggccagcacctcgcgatactcaaacggcgtcaagccggagccgcctcctctcgggaaggcgacttcctcactgacgagcgccgaggcgaacgccggctgctgaggctgctcatccgatttggacttctttgcgggtgccgagcgcgagggcgaggctggacgcttgcgattcgaagagggcgccatcgtcgagtatagggtcgaggtgagggacaacggaggactgcgcgaaggggttcgagatttctcgcggaaattcgaccaaagtcccgatcaagccccgacgggggtatcaaggggatgccagcgcagccgagaccccctccctgccatctcccttcgaacgaccatcacctcctcctccctcccaccctccttccctctcctcgctccagtacacgatggccgacgtccaggaccgcctcaaggaagtcgtcgacatcccgtcgtcctttatcaaggacggttcccaggtccgccgtcacatccctcgcacctcgcctttcaccgccggcctcgacctgacaacatacacggccctttctccctctctcgttcgtatcgcagtttatgaaccgctgtgcaaagccgaccgagaagggtccgttaccagtcttccttccttcctttgacttgccttccttccttctctccatcatccgctctgtcgctgtgctcccatcgcccccgcttggcgtcggctctgcgccggcccgctcgcacggaggcgttcatgccctgacgcatcccgctcgccagagtctcgttcttgacgaggcttgcgctcgctacccgacggcgctcgctcggcaggcaaagccgggccgggacgaaggcagggcgacatgcttcacctcggaccgcatcgcagcatgtcgagcgctggtcggttggaagcggcggggaaggaggcgcatcgtgctggttccgcatcgtgccgtgccagcctgtcgcccgcctcctcgggccccgcttccctctcgcgcgtgcgcgtacgaggcgagatgtctcgggaagcgagcgggcgggggggcgtccgaatgtcgattggtcggggaagaaacggtcgtgcactgtgcagccttggcgtctgcctctgctgtctgctcggacgagcaggccaactcccgccgccgcgcaggacagatgtcgcttgctcgctcgcgagccgggccgtccccccaaggccggcgcggcgggaggggggagaagggggggaggttagttgtgaaggggtggggagaggcggggagagcaaggggagcagcagcaggtatggcagtagcagcagacggggcgccgtgcgtttgcttcaatttgaacgatgttgggcttagtcgatcaaaagatgaacgctgtgcattctcttggctttgacgttcggacttcccgacgctctccaccctactttggtcgacgtcgaggcccgcttctgtttgagtgcgactctcccggcctagtgtctgcgagaccagcgtgagaaggagcggccgtgggccagaggagagggacggaccgacttgcgccgatggttaagcacgagctgcgggacgaacgaggccgccctgatttttcgtccgtcccccaagggcatgtcagtcagcgtgagcggacatgggtgggcgagggatcagagggggacgacggaccaagcgagaaagtagctgcccgttttcgacaagagaggtgtgtcagctgggcgtttgctccctttctcactacggcggagaaagatgactgacgaccagccgaggagctgtgagacgagctgagccatgtccatcgtctgtcgtcgtcgtcgtcgtcgttgttgctgctgctgttgctgatggcccgcgggttgaaccgaggaagcacgcgagagccggcgctggccgatggcgctgtaaccctaggttggagtaaccctagctgcagggtggacaaagagcacgcgtcatggcttgccttacttcgcctcttaccatcaccatcgcaccgccggtcagtctagagaagagaggagagagagagagagagagagggagtcaggaaggagacgagagctgacttttacacgttcctacacgctgtcatctccacctcgttctctcgctcgctcgcgccatccagcatctcgctctcgcacctccttccctcaacttacccatccacccaccagtctttcgcaaccatggcctggcaggacggtatcgtccttaagatcctcaacggtccgtctgcctcgtccctcgcatgctgtctctttcttccttacgtagcctcgtcgttggcatgagaggaaggatggacgcgagatccgacccgccctcccgtccgcccgcgcgcgccaaggcacacaccacctgaccctccctccttccctcctgcccacaccgccagtcctcgtgttcgccttcacgttcggctcgtcgacctacaactcgacactcggctggcagaaggagacgtatattacgccggccggctacgtcctctgggtctggtcggtcagtcccctctcgcctcgcctctcgcttaagtcgactggcgcgcgtgcgggagcagatgatgcgcgttgcccgctcgctcgccgcttcgccccttgcccgaccccgcctcttctacaacaacgtgcattctcgccaagctgacacgacgcctctgcccatcccggcccggcagctcatccatctcctcctgcttggctttgtcgtctaccagttcttcgacaagggcaaggagatcatcgttgacaagtcggtccccttccctcgcatttccctctctcccctgcgctcgtgtctgaccctccactttccccctctcccccccgcagggatcaggacagtggatggagggttcggggattgtcagctgagcgctttcggggaaggggaagccggcgaggaggatggagtccactgatcgacagggagacagacggaccgagaatgcagtgaccctgcgaggggcggggtgagcaggcaggcagcaaggcgaaggcggcggcagggatcgcacggacgagcgagcgagcgaacgagcgaacgagagggtggggaggggtagagacgggaggttcagcgcttgtggttctttgacagaggagggcgaaggacgagagggagggagagctcgtcgtcgccactcccggtcgagagaggacgtcggcgccgcgctccagcctctcgcccccacccgcggccccagctccaagcctttggacgcctacgaaagaggaggaggacgaacgttggcatcgagagcccgcttgagatcgcacatgtagttgtactgctcgggatagatgaggtcgtacgggaagctgcacgggtggcaggggtggcaagggaattggcgtcagtcgaggtcgaccgcgcgcggaggtgatcagctcgcgataagtggaagggagggaccaacatgaccggtaggtcaccaatgaagaacttcatcctgggccgagtgtcgagcgagacgggatggagggtggtggatgggtggtcgttgtcgtcgtcgtcgtcgtcgggtgtgaggcggacgcttagggttaccgggcgcgtcagaccggcttctagaggcaggcaggcgaggcaggcaggctcactactcgtcgcagcgccagcggagagaaggggcttgacaagaggcggcggcgacgctgagagctctgccagcaaagacgagcgagcgagtcaagacaggctggtaggcaggacataatgcccggcggcggcggttcatgctctctctctgcccgcccgccccctccgaaggcgtccgtcgcgtcgcgtcgcgtggctcaggcgaaatagaggcgaggcgaggcggccgtcgagcagccttcactccgaccactaccttctccggcacgccccttctccactcgcatctgcccactatttgcagccgccatccagctgctcgcctgcctgcctgcctgcctgcgtctctcacctcgccgcccctcgcctgacccccacccgggtcgcacccgccatgtccggccgcttccaagacgcgtccctctggtcgccccttcccgccgcctcctcttgctccctcacttcctcctccgccgccgcccatcaacgcaggcacccagcaagcagcccggccggctcatcgtcggacgacgaggacgaggtcgagcagctcaagtacgccgtttgcttttgcggccgacccgtagtggcggcggcgcctcctccttcggcgcacactgcttgttcactcgcgacgacggcagtggccgaggacgatgagggcgagcagatctactgcagtacaggtccgtacccatattctactcttgtgttcgcctgacctttcttttactgggctgggggtggaagaacggaggaggaaggacggacccgccaagccgcgtcctctcgccctgtctcggtcgaagaggacgcggcttggcgtgggatttcggtgaacggtgcatgggtgatgttgaaagtagggcgagaggagctttgcgtgccgccacagaggactggcaggaaaggaagagagagggaggcagaggaacgcatgaagagatcaccgtagtcaggatggaggcaggcgactcgtcaagcggggaggacaatggaggggcgagacgtcgccaagtcgtactcgagtagagagtcgagcgagcgagcgagcgagcaggccaggtgatcggccaaggcgcgcggtcgttcctgctaagacggactgtcaagacttacgcacagagacgcttgcggacataccccttgtcgaacgttcgtacctcgcttcttgaagtcaagctttggcaccaggcgcggccgtcagctgaggatgggcacgcgacgagatggcatcagtgtccgccataaagccgcccgtacgtcagtcaaccagcgcccaacgcatggacctccttctttgcctcatcgtcgtggaccgcctctgcgggcgagcgatcgacgatctcagtctgctccttgtcagccgtatcttgaatcggcggcggcggtggcggttgacgccgtgacggcgacagcgtcgacagctgcgcagccgtttgcggtaccgacttccttctcggttgaagcggctgtcgctggcgcctctgccagtgggtaacggagcaggtcagagaagggatcgcgagaaagtgacgagcagcaaaagaaagatcgcacccggcgagcccgaggactgagcgacaggaggcccgccggcggtcgagtcgtcgcccatctctccctcggcaggctccgccgccgtcgctgccgtcgccgtcgttggcccggacgatgattcctgccgctgctgaccagcctcagggacagtgacgagtgagtcagacgagctcgacgtcgctggctcgttttgctccgctttggctcgtgctcgtgctcggccccctccttcggtccctcgtcggcgccgtcgccaccagtcgtatcgcgctgccgacggctagcaccgaagaagatggacctgggctcgatcagaagagcaaaactccaagtcagccctcttgatcgactgggcaaagcttgagaggcaggacctagccggctcgcccgccgtcgtcgtcgagctcccgccctcgccttcgcccttgacctcgccctcggccgccgccttcttcttttcttgcgcttcccggagcaatcttctagcggccgccggcttggtggtcatcattgtgcgtgccatcgtctgtgctttgaaggggtaaggaggagagagtcactgcgcgccgccctcctcggacgatcggccggcgacgagttgttcaagttccccccttccctcgcgagttcgctcgcctgccctccgacccgggccgacactcctagccagccagcgaccttcggcctacactagggctcgccgagccccgagcaaagggctgacaccccccgtccgtcgactttgtgctggcctggttggcctcccatagcgttcacgtacatcggcgagattggcgtctacggtctccagacgtccgtcctctcctcgctcggtcttcctccgccaatcgcgcccttgcctaaaaccccccccctccccttttgtaaacggacacaggtgggacaacgactggaagccgcccagacacacgctcgacgagtggaacgtccagatgatggagcgcgatcgacgactgacgggctcgaagcgcgggcagagggtacgtcctccttccccccccccctccttgccttgcgcgcgcgcgggatctcgagcggaggaggaggccgtagcagcgccggtcctacctcctcctccctccctccctacgccacaactttaactcgcgctgacgacaacccctgaccttgtgtcgcgcacgctcttgctcgctcaaaggacgacccgatcgcgcccaactcgttcgcgacaaactcgatctgggacatcaagacgcgccaggcgtgagagccagcggcggcggcggcgagcgcaagctggagagcgcccccccccctcctacctcaacgtccttgccggccttgcggcacggcgcggggaggccagagggcgagtgggagttggggatggagatgggagaggggtgcgcgaagatggtgaggggaggcatatagcacacgattctgaatttggggtagcgagccgaggggctcagcttgcagtcgtcgtcggcgggcggcattcggacgacgtcgagcgaacgagatgggccggtgcgttcgctcgtccggtcgagcgagagaggggtgggtagaatgaggtttagagaggtacaacagcccgttcttctaaacagcagctttacaacgtaacgtcccagccttgcaccaagctggcagaacagcaagctgccgctccgacacacacacacacgcgcgagagccccctctctctctctctcgagccccatctgcacctgcacgcacggcaccgaggttctacaccgaccccccgccatcgcctgtcggtctaggccggacgagagggaacaagctcgtcggggccctcggaagctctaacgcacgcggccgggcggcaggcgagggggggagaggcagggaggaagccggtcagtccagtcttggcttttttggcgtcgtctgcgagagaggggagaggggaaggaacctttcgagacggcgttagcctttagggagacgtgggaaagacgggggctgtcagtcgacccggcctctctttcgcacagaccgaaggcaagcaagcgagccaaggaaaggaaagggagaaggaaggagacgacgcaccttgacggcgttgtcgcgctttcggcgctcggcgagccgcatggtgaagaagtcgcgatggagggcaaagacgctgtgcgtcggcgccggcggcgtcggcgcacagcgtctttgccctccatcgcgacttcttcacggtgaaggaggggatcagctcagggactgctgcgcttgcgctaaggccttcgtcagcacgtactgcgtcaacgtctcgccgacgacaatctcgcggacgccaacgacattctcatgccggcagaccatgagcgccatgacctctctcaagctcgtgattggaaatccgctcttctcctcctcgagcttgagctttttgagcgcaacgacgtcgcccgtctgtcgctcgcgcgcgcgaaagacgacgccgtacgagccttcttcgatgtggttgagccggtcgtaggccgagacggagcgacaggacatgagtggcgggtaggcggaccgacgggcgggcgcatagacggaggactggataggggccggcggcgcgaggtgggaggaggcgtaggcggacgacgatggcccgggcgaggtcgggcggggcgagagcgccggcgagagagcgtactgctgcggtcctccggccgaggaaccggccgcggacgacgtcgaagccacttgtcgtttccggaggaggggcgcacaccaagatcagttagtccctctcccgagcgccagcatgtgtggccggacaagacagacgaggaacgcaccgagccgagcctcacgctccttcgcctcggcgctgcgctccctccgccttcgctcctgcgcaaccgccttggtcttccttcggatcttgaccgcgagctcgtcctcgagcgcggcctgctcatcccatttggagcgcttgcgcgaggcagacgaggagccctccacggcggcgctgttgggtgaggtggttgctggggccggaggaggagagagaccagaggtcgaggtcgaggcagcggcagcgctgggctcggagatcgcctgcggaggagggggcggcaccgacagtcctggagctgctcaggaacgggggagtcggtcgtcaggtcgggcttcgggcaaggtcgggcttcgggcaggggacgtactaggatactgcccacctgactcttcttgctgctgctgctctgtcatctggtgcaagcggtcgacgtcggggcgaaagaagctctcgtgctctcttcccccgaccatcgaccatgccctcccgctcgcccatctcgcccgcccaggccgccgcgcccttcaagcagcatcaagtcgccgtcgccttcacgaagcacccttcgcccgttcaggccttcagcaaggcgacaaagtcgtgctcggccgccgttcgttcgatcgacctcgtcgtcgtccacttacttgccttgccgtctcgagctctgacacccccttccacccgcccgcccgcacacttcagtcgcaagtctacggcgcgtgcatgctcgcccgctatcaggacgtcgagcgcggcatgtgcgagcaagagtttcaggccttcaagacttgcgtccaggtgcgtcgcggggaggccgatcgagaggggctgctgactggccacagcttgagctgacccccttccgctccttcgtcttgactccccccccttgccagacgactatgggacgcaaggggtagacactggccagagcgctagtagccagcctttcgcacgtcggacgctgcgccccccccccccccccccccgttgaggagagaaccagaggcgcaagcagtacgcggcgcagcgtcggcagagacaccagcaggcagcagcgacgacggaaggccggcgacgtcggcagagccgatcggatcacggccagcaagggtcgccgcagacacgacggcaacgtcgtactcggagacaggaccgccgaacgagccagggccggtcacgcgcaagtccgtgcgctggtgggagccagggacgaaaggctcgagcgcgacgcgagtgcgggggatggagccgagatggcgcgagagcaggcctttgacgtgctcgtgccgagcgacacgccagaggggacgagccgagcagatgtcgtcatggccgacgacgttgggcagcgagcaatgcgagcagtggtcgtcctggccggggcagagcgtgcggatcgacaggccagcggcgacctcggccgacgtcagacgcaggttggcagcgaacgggatggccgacatccagcgccgggcgatgggcgaggcgttgtcgaggacgacagctcggtcagtcgagggcagggcggccaggagagactcgcgacgcttgacgaaggccgtctggcaccgggcccgctgcgacgtcggctggacgacatcgtcctcgacctcggcaagatcgtcggcatcggcaaaggcgaccttgagctgggcgtcggccgactcggccatggcagctcgagcgtggggcgagacctcggcgtgcgagaggaggcccatgccgccgagccgagcgggcagagacacaaggccagcgtccgatacgaggcggcgaggcgacgaccggaggatgtgaaaccgctcgagcagggcctcgtcgagctggtcccacgcgccaggcaggtcgtccgtccgaagggagcgctgcagatgacggaggttgctcgccaagcaatgacgcaagacgaggagagcttcttggccgggcaggtcagaaaggcgcgagagggccggcagctgggcctcgactttggcagcaaggaaggcggctcgaacatcggcagggccgatgcaggtgccgaggacctcgaggccgtcctgagcgacgatggcgagcggcgtctcgtgacacttgcgcaggttgagcgcaagctcgcacgcgggacgttcgtcgaaaaaggcggcgaccgagtccagggcgccgggctcttccgacaggatgtacacgtcgtcgaggtaggcgagcaaggcgtggcccgggccgaggtgccgttcgagagcggcgagggtgttgcgcgcgccgatcgaaaagagcagagggccgagaggatcgccttggcggacgctttcgctcgaggtaaggacgaccggagcgtcgccgccgacggccgagacgacaagcggggtcgggacgtcgtacgcccagcggccggcgcggaacagggcgggcgcatgctggaggagacccttgccgagctcgactcgagacaacgaattgaaggcgttgctgaagtcgagcgaggtgacgtgcttgtacggggccggcaagtcaaagtcaatggcacgctcgatggcccgggtgatgggctcagtaccgccggggctgccgacgccgaactgccaagggaggagctggggagctgacatcggtgtgcgcgtgcgtttcgggcggggcagagccagaagaagattgaggagatcatccggcaaagggcggtcgcgcagagctatgaggacgcggtcgagtacaacgtctgtcccttctcctcttcgctttgctttgcgttgctttgccctgtccgtcgtcagttgaacgaggagaggaagagaaccaggggctgatgtgctgcgcattctcccccttcccctcggccactggacactctcgacctccgcgctcgctcactcgatcgacgctcagccagagagcttcgcaagcgtgacgatgctctacagtccgtctcccttctctctgccttctctcccaacctccttcccctcccgccctctcacgccccgccttcgcctcacgtcaatcgaaagccgtcgctgactgcccgtccactttcgcacccgctccggcacagtcgacgttgaggtcaacggccacaaggtcaaggcgtttgtcgactctggcgcgcagagcacgatcagttgcgttccgccccttcatcctctccacttatttcgccgcgcgatcgctcgtcgctcgtcgtcccactcttccacctccttcaattctttctctttctctttcgtcttcctcttcctcctcctctttctctcctgctccgcctcttcctccctccccctctcgccgttcaatatacagactgacgtccccttcctcgcctcgcgcccgtccgcccgtctttcgccgcgtgtcgcagtctcgcccgaatgcgcagaggcgtgcgggatcatgcggttgctcgataagcgcttccacggtgcgtcgtccgcccttcccctcctcccgttcgcccgagcttcggaccgctgacttctgagctctctcccttctcttcctgactcttctcttcctgacgaatttcttccttttgaccaatcgaccgctcggccgcgtcatcccgtccttcccacaggtgaagcccgcggcgtcggcaccgccaagatcctcggccggatccaccaagcccagatcaagctgctcgacctccacctgcccgtcagcttcaccgtcctcgagggcaaagacgtcgacctactgtttgggctcgacatgctgaagcggtatcgcgcggcaattgacttggcggagggcgggggatgtttgaggatccaggggagggagtgagtcccccccccccttctttctccttcgcgcgtttgcgtcgggttggggaaagccccgctcgtgaacaggcccgttactgaaaactctcttcgcccgttctgctcgccagggtgcctttcttgtccgagcatgagctcccggcgaaagcgcgccgcgaagtctgggtcaacgacgagcgtgggagcggcaagaagccggcggtcgagccggcgaacccttcagtcgctgccccgtccagctcggaggccgcagaaggaggagcgggagcgggagggatggcggggtcgttcgctgctggaggccgagtcctgtccgtcctcctctccatctcccagcccaaaacgatcaattgaccgagggaccgacacctcccccttttaatcgcaccggcagcgcacggtggggggggggcgtggtcagcgtcgtctctcctagcgggacagcggggtgagtttggaagggagagaagggaaccaacatcgagccccgccttctgcatgagctcctcgctttcgagctcaaatgcagacgtcacgtcaaccaagctgccaatcaccgggtccgcatcgagcgccgccagccagtcgcgggccttgacgtcgtttccgatttgggagatcatcaccgacagcgcatctgctccgtagcgggtctgggagagggcctgggaggccgagcggagaacggaggagagctgtgtcgggggctcgccggcgggcgtgccgtctgtgagggcgatgatgaggacaggcttgcggagcgtgttggaccgagctgggccgaggagcgcgggctggaggatcttctaagctcgttcgaagcgggcggcggcggcgggacgcgaggcgcggtcagtagatgtcatcacccggaaagaagagagccccttcgcacagaagaggcgcatcacgtacctggtcaagagccgtccccagaggcgtcaagcccgaaaacctaacctgcccgatcagctccttcacctggccctcgccgcacaccctgtcggccgagacctggctgttcaagaacctgacgcttagcccgtcctggtcgagcaggccgcacgcgcgcgcaatcttggagaggatgagcgagagctcggtgattcggttgccggactcttcgaaggccatcgagcccgagtcgtcgatgagaaggatgacgtcgaagagggcgagcttggcaaggtcgtaggcgatcctggtcgcgccgaaggggagaggggggaggggtcagtcgcgtcgctgaaaagggtgttcaaaacgtcgagcgcgaagggggagaaaaccgcactccttaggcagccgccactctgccatgatcgtttcgaccgcccccgtctggacgacccggcccgcaatctgacctgcggagccgggcgggtagaacgcttggagtttctgctcggcgatgcacgactcgaggatgcgggcaatcgtcgacgggtcggtttggccctggctcggagccgcgccgtaggacggctgctgggggtagttgtgcgagggctggtggtaggactgctgctgaggctggtgaccgtagggtgcctgctgaagctggccatacggcggcgcctgctgctgctgctgctggggctggccgtaccctcctcccgcaccgtaagctccggccgcggccgctcccgcgccggcgccagcgtagaactgcgcggccgagccgtgctgctgctgctggggttgctggccgtattgctggggcagctgaccgtaaggctgctggtgctggtgctggggctggccgtactgctgctgttgctgaggaggaagagcgggctggccatacgcctgctgctgcggaggcggcccgccaaaaggctggtacgtgttctgctgattgtaagtcggctgttgctgttgctgaccgccacccgagggcttgctgaaggcgttaccggcggcaccggcgacggcggcggctgcgagctggcggggggcgggaggcaggaagggaggtgtagggttactgcagcatcgaatagtgtaaggcaaggtcaaggagaggcgggacgggcacagtgacgaacggggtagggtcgggttggctgcctagggggtagggtggacgaaggagggggtcgtcaagagggggaagagagaggcgagagaaagagctacggaagagggaagcgggcacacggaagcggaggtgaaggaagacggagcggaagagacgcggaagagagaggagccaatgagagagaaggaagatgaaacgagtggtgggcgagcgcgaccgaggctagaccgaccgagcgaccgacatcctgaaccagacaaaggccaaggccggacgatcagagtcgaccgagccgggcccgagcccggacgaggatgagagagaggacccgagtgaggtgcgagaaggatgacggggcgagaacctcccgccaggcgtgaagcagcttgagggtacctgtctcgaccgcgccgccggacgagaggacgaagggacggaagggagcggcgatccggcctgcgtacttgagggtcttgttccgagcggccagggcgagggtgtcgtcgacggcgttccgggaccggagggcgaacgagagcgagaggtccgagtgagcgcgggcagagggccggacaatcagagtcgaccgagccgggcccgagctcggacgaggatgagagagaggacccgagtgaggtgcgagaaggacgacggggcgagaacctcgcgccaggcgtgaagtagcttgagggtgccggactcgaccgcgccgccggacgagaggacgaagggacggaagggagcggcgatccggcctgcgtacttgagggtcttgcttcgggcggccagggcgagggtgtcgtcgacggcgttccgggaccggagggcgaacgagagcgagaggtccgagtgagcgcgggtagaggctgaccgggcgtcttgcgaggcgagcgaaacaacagtaatgtcgatctcgcggacaccgtcgggaccggtgatgcgaaggtcggttcgaagctgagtgccagggacaagaggctcgagaacaacacaaaacttggcgttcgaggagagggtgttgttgatgagccgcttgacctgctcgtgtcgaccgagagcgaccggagcacgacccgagcaggcctcgtcgtgaccgaacggagcagcgtcgccacagtcgacgcagaagtcgagcgagccgggacagagcgtccggaagtgaagaccagaggcgacctcggcgtccgacagctcgagtaccgaccggaaagggacgacaccgagccaacgtcgaccgaggaccgtgccggactcggagacggtgtcgcgctcgagacgaggaagtcgacggaggacacgttcgagccgagtgtggaaggccttgtcgcaccgggcccgctgggtgacgatcgccttgtcgtcgtcgacctcgagcagaagggctggggccagcgcccggtcggccgcctccgagccggatgcgaaggcgagcggagcgcattcggcgtgcgagaggacccctaggccaccgagacgagcgggtagggtgacgaggtcagcgtgggtgaaggaagggggagcggagggagagcgaaggaagaaagggacagagagaggaagagcggaagccgagccaaggacgttagctgacgttctcccctgcggccctcaacgacgtgcccaaacgatcgcaactcggagcgggaacgcacccttcttgacgtgcggcaggagggcctcgaggtcagccatcaggtgccggtgccgctgggtgacgccgcgggacgagaggaggagaaccttgcaggcagaggggagggacgggagagcatgtcagttgaccgggagcttcctcgttgtctcctcgaagcttcgactaggcttcgacgacgagggacgccagggaccaggcgagagcccactcgctccttcgctccagagagagagaagcaggcgcaccttgtccttgcgacgcttgaccttgcggccctcaccggacgagctcgtaccggccgtcaggctctgctcaagctcgatctcggtctgctctgcgacgagggcgttacgcttgcgcttgtcttggagcttggacgccgtcttctggagggaggccatcgtgtcgtgtgggttgagggttgaggggcgcagtctccctgtgcgggccgaatttcgagagcgagggcgagagcgagggcggctgactaagcagccttctggagtcgacccaggctcatcgcgcgctctcgtcagtcgtcaccccctcaacccacttcctctccctcgcgatggccgacccccggatgacgcagcgcgaagcattcgacatcaacgcagtcagtcgggcgtagtgcagacagcttgctcggactgacacttgcacttcgctcgcaggccgccgccgtaaaggagtacaacgtcgagccaaggatcggtccgtccctcgcctgccctctcgccctgccatggccttccctccggatcttcccggctgctgaccttcttatacttgcctcgctggcagactaccggaccgtctcgggcgttaacgggtgagtcttgtatgcgctagctcgcgcgctcgagaggcttcttgcgcagggcaggcaggactctctcgagatgggagcgagccccccctccctatcgccctcgccgctaacgctccgccctcgtcgcacgctagcccgctcgtcgttctcgacaatgtcaaggtttgtcctttcggacgtgactcgtgaagagggagctgtgaggagaggacaggccgagggttgacggaagagggagcagcgcgagagaggggcggctcgagcatctcacccccgcccgccctctgcaggctccgcttccctccttcgccgctcgaccgctcgcccgcccgcccgtcttctgagctgaccgcttccctgctctccctcctcgccagttcgcctcctacaacgagattgtcaccctgaccctgcccgacggctctaagcggggcggccaggtcctcgaggtccaaggcaagaaggcgatcgtccaagtattcgagggcacctcgggcgtcgacgtcaaggcgacgcacgtcgagttttcgggcagcgcgatgcgccttccagtgagcgaggatatgcactcggagctctgttcagtcttccccagccgcctcggacgtcgctcagcggccggccggccggccgctgagcgacgtccgaggcggctggggaagactgaacagagctccgagagcccctgctccgccttctcgcctcagcgccgaccacgcaggaccgacacatgcaagacccgacgacgagcgctagcaaccagcgcgagccagcgagaggaacgactcaccacggcgtccacgtcgttatcggcctcctcgccctgtcgcgcctgctcgacatcgccctcggcctggtactcattgaccatttcttcgtcctgtcggcatccggcgtcgtcgttgtcgtcagagaggggagataatgggagggggtagggaggtgtcaggtcggacgttcggtgagcgcgcacgagggtcacaggagtcgcgacggagaaagggagaggacggaaccatgacctcgtcacctcccatactgcaagaatccaacgaagccacaagggagtcagcactgggcgcgactctctcacacactcctcagaagcgccaagcccaagcttcaacaagtgagggacgcactctccgtcattggcgtagccctcctcgtcggacatggctggctggctggctgctgcgtcggcctctacgtcggagctgtggttccgtaatggggtctgggtctgatctgcgctggcgtaaagaggggacgtgctagatgtgcgagaggagcaggctcaggatctgaagggtaggagggttaggatgcgaggtcggccaggctttcgccgggcgcagtgcggcggcttgggcggtgttacagggcgagttacggcaggcgtgacgggcgctcgtcaagagcgttactcgctactccctctcttcgtcctcccgatccgtcatgtcgtccgagctcaggtgagggtggcttgcaccgagagcgctgagtaggtcacaagctgaccttctagtcgtttacaggtacacggccaacacccagctcgagcagcgttcgtctccctctctcccgcccgaccttacctagccagcctgcttggctgacccttcttgttcgacacggcagttcacgcccggtacaacggaactggtccgtctttgcggtttgactgaactgccccttccgagcgagctgcatgcataatctcttgacggtgcaagagtgactgacgccctgcttgactcctcctggttctgtgatcgcacaggccacgccgacatcacaaagtagtgcgtccccccatcctccctcttgtcaccgcagcccacgttcgctggcttctttcgtttcacagctgaccagaacctccttttcctcttgccccgcccgaacagtgaatggctcactcaccagcaccgcgataccaacgcggccatcatcggccatccgcctttgctgagctactgtgcgctcgccgagggcgagagtctcggccggatgaagtttgagctgctcgaggtgcgttcgttttgcctgagctgggctctggggatcggaggagtgacgacggcggctgcggctgcggctgaggaggggggcacttgtggcattagaggggggtgcgctcgtacatgatcaagctagagtaagtcatagtcgataatctcccgtgaagtggaaagagaagaagctgttcagtacatgatgaacttgagaggtggaggaggaacggtcaagaactggctggatccatgcggagcacgtatcctgtttcacctccgcctgctcggcgatcggctcgatcggacgacgccgctaggcgccgcactctgggccgccgcaacgtgctcctttttcggctccatacgcctcggcggatgcacgcctcggcgaatgcacgtacggccggatccggctgccgagcccgaagacggctgccccggacgtctcataggacgtcctgctggcggcgcagatgccggacgtcgatccactcaggacgctggccgaccagacggccgtcaaccaaccggccgcaagcgagcatctctctggctggcggcaccaggacggccacctcgagccgatgacacggatttgacactcctggccgagctcggcgttcaggaacacacctgatgcgccgtctgagtcctcttttgccggcgtgtccttaacactgagcgagagattgcgtcgccccttttctttcaggatcgctgtgcggcacgtcccttccccttgggagcggcagcagagcagcgagcaatccgccggcgacgcaagactctgctcgacaacacgccatatcagcatcatttagtctctctcattctcaggcatagcttccttcctcctcctcggagacgcggcgctgatgctcgtcatgctttcgtcgtgcaagaccctgatttgtgagaaacggcgccggttcgacggccagccgatgtcaaaatggcggcagaagtactttgattgctgtgggcagttcggaacaagactccctgtttgatcttctttgtcatcgcgtcagattctcaagctcccattaactcggattgatgctattatcgttgtaatttctgtccaagccaagaacgacgctgtcgacagtcgcttgacgatctcccgggcaatccagcacggcgcttgacacttcgatcgggcagcatgcttgggacgccgaactgataagtccgaggtggaatttcaattgctctatcgtgcacgaatacccgctagctgacggcaaccctttgcgaaagagggatgaccaatgttcctaattaagcgataagccggttttggaatacacggcggacgacctgatatgtaatcctgaggtcagccggcacatgtaccagtatgtcataccagcatcacatcagtaattataccatcgtgatactggtatgccatactgatactagaaccaatactgttgtggtaccagtaggcgtactagtacgtaccagtatggtcccgcccaggtacatgcggccagcagggcccgaatcgtgaggtctgatgcagccctcgcctcccagtctctttccggccctcttcgtccctgcgacaacgctcctcccgttcctcgtcctccgccgacggcgctcgtcacgcttctcaagacgagcctcttcctccgtaccgaagagaggggcaggatgcaaggggcgagcggagcacgcaccgaccggcatagcctccttgactttgtcgagccggccgaggttccgtctcagcaggtccttgacgtggttcgtgtcgacgatctcccaaagcgcctcggcctcctcctcctcgagctcggtccccgtgtcgagctcgacgtcctccggaaagacgtcctcgaacgtccagccgggcgtgtcaacgagcgtcagctggacgccgtccgggagcgaaagcgtcgtcgacgtcggcgtcgtcgtcgtcggccgggtctggttcgacttttgcgggtaggcgctaatcggcaggccggtctggcccgcgggcgacaggagcgagttgaggaccgacgtcttgcccgccgacgggagacccgcgagcgtcacggtgaagtcgtcgtcgtccgaaggcgccgacgccttcttggcggtggcgagcgacgagaggtaagcaaggagcgtctcgcgtccgaccacctcgtcgtgagcgaagcccatcgcgctcgtgctcgcactgctcgacgacgacgaggcgacggcagcggcagctgaggccgggggagggacgacgttggagcgcgggacgaacgacttgaagaggacggtcgggaagcgcgggcggaggtactggagccactggtcgagcgcctcgcgggggacgaggtctgccgggagaggaaagggagaggaaagcatatcagccgagaaggggggcgaggggttgccagcacggcaggaaggaaccggggggggggggaccgaccgatctttgtcaggacgacgacaaccttccccctcgcagtcttctcgccctcggccggcgtctcaaacagctgctcgagccacgggctccggccaccgagcggatcccgcgcatcaacgacctcgagccagacgtcggccttctcaagcgcggcctggagcgtcggaatcgagctgtcaaacagcagcggcggcggcgagtcgtccttggccatcttgaccggcttgggaagggcgtttgcccgcgaaccagcaagaagcttgacgcctggtctcgcctcgggctcgccctcgctttcgtcctcgtcctcctcgccagcgtcgcgcgcggccttgagcgcggcctttgagcggcccttgagcgcgagccgctcggcctcgagctgggcacgctgctcggccagctcggcgaggacttcgtccttgtacggaaagttgttgggaatccccggatcaacgcgcttgtctggcgggtgtacgcaagggagggaggagggatgcgagaaggtcagcgaggtgtaatgagcgagaccgcaacgcacacccagcgagaggaccacagcgcggcggccctcccaacccgctctcccgctcatccgcccgcccaatagcgttagagcagaggggagactgacttgaccgccaagtgacgtccttctttgccttcttcttattcttcttgtgcgtctcggcgaccttctgctggatcttctttcggtcgtgggtcgtcccccggttcgaggtctctttgggggcgggcccccctccttgagaaatgctgcatgcctgacctgcagtccgcccgcctgcctcttgcagtctgcgaggccagtcccccaggtccgtcccaaccgaccgattgaccgtcctccggcgccgccagccagccagccagtcagccatcagacgaccggccagtcaattcaacggcccgccatcctccctccctccctctctcccgacccagacgcagaccgggcgagctccttcgagacgaacccgcctccgcctgcgcaccgcaccgcaagcggccggtcggccctccctcgcttgaagcctagctcacacgacacgctagtgccaagagagtcggagacgagaacaactggccgtactctcgcccgccctccctgctgggtcgcctcgacctcgcctcgccgactccccgtcccatccgcgccgcgccgccctgcgctcgctcaaagcgcccaaccttgcgttccaaagagcgacgaggaaccacatcgcctcgcctctcgtacggcctcgcgtcaggcggctttgagcaagcaagtgagcaagcaagccgatgcgagcgagcgacggatggtcggacgggacgggttgcagacctccagagcgagcgagcccccttgcttgcctaggcttcgagctcggccggatgtcgcccgcctaccgcccccttcccctcttcaacccctagcaaagagaagagagagcaagaagaagagaagagaaacgcacgccatgtcgacccccttgagcgtgaactttgcatggtccggctggtaggacacgacggtgagcttggggttggcgttgtcgatcggcatgatgggtgggtttgcgggctagcgggaagctcggagagcggctgaggggctggctcgaagggagggagagctggagggtgaaattgatcgatgacgttcttggccgagcttgagatgccgtcgatgctggtgggtggagaagggcaagcaagacggtcgtcgaggtcgacacgagagagtcgcagccagccagccggtcagcaacccccgagaaaaaaaagaaaagggtcacctaagacgagacgcgcctgcctttagcccgtccttctcccatcagccaacaccgccgacggaagattgcatttcaaccatcagtatcatcctccgatggactctccagcgcgctacacggcgacactctcctccaacgcctctggccgatacagtacgcggatgggggcgctagggaagaggaagcgtccgagggggggactatcgactgagagcgagacgagctcgagcgacgacgacgacggcggcgggcgggggtggccagctgctgctgctgctgctccgcctcctcctcatggaggaaaggagggtagaattcggtccaagagcttcactcctaacggaggaggaggaggttgggcgtcggcgtcgagcgcgagcagctggcgacgacgaagcgaggcgcagtcgtccgtcctcatttcctcctctccttccttggcctggcctggcctgactgatcccctcctcctttcccgttcctactttgccctacccgtgttaaggaaagaaagagataggggacgacggacgtacccaaccagtctcccggcactcttgatgccgaccctccgcctcttgagctcccttccctctcctcctccacccctctccctctcgctctctttcgcctccttcgctacacgccgcgcctctgcccgctcagcctcggcctgctcgcgggcaagacgggtgagccggtcggattcggcgctggcgaagagcgactcggggaggtagggggcggaggagccagcggcggcggcggggcgagaggaggaggccgcggccgaggcgagtgcgcgagcttgagcggcttgtctccgggcggctttcgcactgtgcggttacggtccaagggcgatgatcgagttcagtctacgatggtaactttccagcggggagtaagggagaagggggacgacggacctcgactcgacctctgcgcgtgcacgctcgctcgcaagcgtctcggcccggcccgaggcaagcgtcgtctcttcaggtggggcatcgtcgtcgtcgtcgtcgtcgctctcttcctcttcactcgcgtcttcctcctcgctagacaggttggcgttgctccctccctgaagcagttcgtcgtcgtcgtcgtcgtcgtcggctcctccaaggccgccaagcactcgctcctcgtcgtcgtcatccgaagtgggccggccaaacgtcgtcttcttgcccttggcgccaagaaggttgaccgcgccggtttctgcactccgtttggccatcgtctctggctgtttcttactggaaggacaagggggagagggagaagaagagtgggtcgaagaggagcaaggagcgtcgaggcaattcctaccttaggctgcgcgcggctgagagcccaacttgggccgtcggggctttcgcaaggaaggacggcctgcacctcgcacctgctccggcttgacctgacctgaccttcgacctcagaaacaaaacaatctgcccagcatgctcgaccacgactttgtctgctgtcagtcctcttcgtcctctcgcatacctgcacgtaggccgagccgctcggtctctgctcgacccgtcgcaccggcgttcgagagagatgctgcctgttccgcagctctcgctcgagctgactcctttcctcggctcgtctgtcaaacaggctgcatcccgctcgtcaatgtcggcctctactttatcctgctggagcagctcgtccgtcctcccttcatttctgcccttgaccccacccccattccagcgatcactgacgctctctctcggtcacgcacccgcgcgcacaacagacagttgccatcatcgccggcgtcgcctcgataggcacttcaacacccgtcggcgcgctcgccctaccaagcttcacagcctggctctttgccgtcctgtgcttcgtcgttgctgccgtccagatctttgggcttgttggggtcgttcaggtgcgttttccttcctcctttctcacatccttcctgagttggtggtcggcgcagcaggccggtgacagccaagccccccttgcccaaccatcttccacttacgccccctcctccgctttccgcgccttacaaaactctcccctttcactctccttgacgagcacgcgctgctcggatgtctgtctcgaatcccccccccttcctctgatctcctttgtacgtcttctgtggtatcgccaagctgcctctctgtccaacccccaccttcccgcccgcaagctgttcgtccgacgcaagggcaaagcaagggaggggttgaaggtgaaggtcatgtttaagggagctcgcgacaaggcaggctccgccgggcccggcggcggcgcgcagtgcgccgcgggcaggggtgcgagtgtacggagggggcgcacggacgagtacaagtgggcggagagggaggatatcacgatgtgggcaagggagagggcgaaaagaggagagggtgctctggcgagtcggacggaacttgagggcggcggcgtggacgaaggcggcgagggctgggccggcagcgggcgaaagtgcaagggcgacggctaaagagcatcactcgaggaagacgctctcggtccgccgtcggccctcctcatccgcgccccagtcgacctcgcgcattcgccggccgagcgtttcgcgcgtatacagctcgggatccacgccgatccgctgcggccggcagtggtcggcggggtgctgcttgcgggcgacacggcgggcggagagggaggatgagagatgcgctgttgtggaggagggtgctgcgtgctgggttggcggtggatgaagggtcgagctggaggctgatgattttggggcggagggctgaagggggaaggggtttctgaaggcctgcgccgaagggaggcgagaagccttctctaccgccgtcgccgccgacgaaggagcgtcccagaggctgcaagcgccgtcggtcgatgtcggcgagacggccgttgcgaggtgaagcctctcgccgtcgtcgtcgtcgtcgtctgaggagacggaggtggcagagtacagcgagggcgccgctgccgttgaccgggcctggctcggcccgagcgcggacgcgagcgaagcgtcgtacggtgggcgacgaggtgcgacgctagcgacctcgtctttgtcggccggtgagaagcgcacgacgtccatcagctcgtcccttgtcaaaccctcccactcccgctgccggccgccgccgccttcagtcagagccagctcccccgccgcccgagcagtgaaccacatgctccgccgcttgcgctcttcaagctctgcagcctcaagcattgcgcggcggcggggcgagtgcgcaacacgcgtcgagccctcgtcgacgtctgcggccgtcagtggcagcggcgtcggcggcggtggtggtggtggcgagctccgcttgggccggacaagaggctgctcgagtcctctcacgccaggcgggtgtgccgcgccggtccgggatggaccgagtgcaacatcgcgccggtcggcggcgaggggcaaaggcgggccaagcaagctcgctgcgagcgtgcgagccgaggcgaggcgcgcggtgtccgacggctcgtctcgtctgctctctcccggccactctcctcgtccccgtctgaagctcctcaaagcaagagaagggaccgtaccgccctcgccgtctcgaccaacgcctcccactcaagcttgtgccaaaagcccttcaggaacgcctcgttcagctcggcctcgcggacctcgagctggacgtccttgagggcaaggggaaagttgttggatgtgcaggtcttgacgtggcaggcgagaacgttactgggggcgaaagtgggggggaaggtttagtggagggcagggaggaagggagggggaggagggtctgcatgcgcaggcgggagggacgggacaacagcaggctggagcgtcgctcgtccttcttcttccgcccagtcgtgcgtccttctccagacgagagagagagagagagcgagacaggacatactgcgtgatgagtctcatggtcgagctatagcgggtcgaggagggtcagagggcggggtcggtgtcggcgggctgaacgaaagctcgttcggctcgagccgacaccgtcgcacgcgcaggcataagacgagtcgtcgaatacccgacccgacggcacttgtccttgcaaaccgctttcgaatcggacgcttcgtatgcttgagttttcaataaggagcgaaacatgctgaagtgatgagagcctgtagatagccgagcgagtgggaaactggcggtggttgaagaggggccgaagcagacgccaacacctcccctttctccctccgaccgaccgagtgcctgaacggcccccagcccactgtctgacgcacgcccatccatctaccagccaggtcggtccgaggtcaggaacgccgacctatgcctagactggagccgccggtgccggtgcccccgttggaggccggacaggccaccagccgaccttgtccatccggaccttgacggcccatttcccccctcctcctcctcctccttctcctcctcctcctgactttcctccctcctccgcgtgctccgccccctccgcagcggcgccctccaaagacgcacgccgacgttctggaagcgcaacctcgagcgacccctcgtccttcaaggccacatcgacgtctccgagccggaggagcgcaagcccttggcccgagacaggatcgtacgtgaggagctttccggctgctttcggccgggttggccggcgtgggggggcggtggaggggccgtttgagggtgaggcctcaacggcggcggcggcggatgaggttgagattgaggttgttgaggttggatgagcttgctgctcggccgtggacgtcgtccatgacggcggcggcgaagggtggtaaacgagctggacgttcaaccctcctacctcccgctcccaatccacctcgccgtcatcgcccttatttgcctcgccgccctccccggccgccgccgccgcgagagatgagagaggcgtgagctcgacggggacgaggcgcttgcgcgtctggccggtatggtatgtcctgacggtgagctcttgacctacgtagcagcccctccctccgaacccccaccttcctcctccatccactcctctctcagccacccatgtacaactcactgctctcgctcgctctgctgtcgagtccggcactggccttcatcggtaccgcgccgctcgtcgcctggtcgagctcgtcgtgcgtccctcacccgtagctcaaggcgagccgagcgcggccccgatgcgatgagtgggatcgtcctcctgacgcctcacctcgcccttctctcgctcgcagaccatcaggcctcgccagcctccagagtcagggcccgatcgtcgacgcccgtcaggctctgagctcggcactcggcggcaatgacctctgccggtcaaaggtgctcgtcattagccaggaggacgtgagtgcgctgccgcttcctcccaccgctgcaggctgcctgcacctcagacctggcggctcgttgcccttcctccttcagacgatgcgctgacgagctcttgctttcctatgtgtagcttcacactgaggacctcgccagcctcccgctgctctcgccctcgctcgagttggcgacgcttcgcatcccctacctcacctcgccttcgctcgagtcgctcgacgccgtcctcgccgacctcgtcacggcctgcccaggcaaggccatcgtcgccaagacggcgggtgagagccttgaggggctctgggcgcaggacggcttcgaggtcgtcaaggtcgtcgcgaagcgggaagaggtcgagggcgagagccgtgccgaccagctgcgatgggagggtgcgtgtcctgccttcagtcatcccttcctgcgtgatccctgctcactcctttttctggctcgccttcagacgcgctgattgcgcctcaggtccaagaccttttggccgcctctgccccgcacgtcgtcctcctgactggccatgcctcgcccgtgacgctcctcgccgtccagcgccggcagatgcccctctctacgccgcttcagtcggtcgccgccgcctttgcgccctcgacctcgtcgccggcgtccaacaagacgcgggacgaggacctgccgcttttcgcgcgctaccagttcatctcgaccccggtccttatgatgacgctcgtctcgctcctcgtccttctgccgattctcggcctcggcattgcctcgctcgcgagtattcaggtcccacctcggatggacaacgtcaagggcatccaggtcggtgtcacgctcgacaagaagaaccagtagggcgcgacgggggcgacggcggagcaggctgcggacagggccgagcggtggaaggaagccctccgacgacctgccaacgtgattctcatgaaacgagtgcgcatctatcctgctctactcggtcgcgagcttgatcgactcaatcgcggcgacgagctcttccgaagccgcgtcgacggggccggtcggcgccgccttggccgccttgggatccgagtcgaccggcggcttgccagtgccgcggtccttcttggccttcaaggaggggggggccgaactctccccaaccgctcagcccccagtcccatggtacgcctcgcctccccacgccgacttctggacccgccaaggcctcgccgcgctcgaggcgctcgggatcgcgctcgactttgcgatggcggtcgactttttgcccgcgacgagggcggagattgaggtttcgcgggcggagaaggcggagagggatgcgagaaggcgcgaggagcaggagcggcagcaggcgggcgagccaaatgaggcaatggctgctgtcgtcgcgcaggtctaagggggctgcggccatgctccccttgtcctctcccctcttctttcttctctcctcatcctctttttgtccttcgtgtctctcctcgtcctctcctcttcccttccctcctcttccgacccccggttgtacgctagatccttagacttagataatatgcaccccgcatgcgagcaaaagggcgcaccgagctcaacttgtcggacggcgctcagtccttgtcgaccagcgagcgagcgagcaagcggtgggatgagctctccggcaccgaggcggatggtcggccggctggtcaaggtagtgctgacttggcggtctatctgcctgcttggagaagggggaggggggggaggggagcgctcgagacagacggacaggctcgccgtgagcgtcgttgagtcgacgttgactgccgccctcgatgggccgccgaggaggtacgtcttgagtgcctggccgacaaagaccctggtcgaaccgagccgtccctcgacccaacctcaagcccagccctcaatcttcaaatttttgccccttcgtcgaccggcccttcttgatctcgctcctccttcccttctcctcccttacccgcctctcaaatctcgcttgatgcccctttaccctctcccgcgtcgcttccgtcgtctcgcccggcattagcggccgcgcgagctcgaggaggtgtgagcggagcttggaaaaggcttcggcgaggttttggggctgaaggcgctgggccgagccggtgaggacgagggtgtgcgaggtcggggcgtagtagggctgaagcgagggagaggtagggggggggcgcagcgttcaggacgtcaggaccgactctcctcccgtcgacgtttctgctgaagagggacgcgtactgaggacttgagcgctgggatgagctcgggcgagatccagtgcgcctggccaaggtcgaccgtcaacgtcgcctgctcccccggtccatcgtcacggtctcaagctcgtcagttcctcccagctcgcaactcagccctccggccatccaatccaaccgaggacggcaccttcgtattcagcttgttgacattctgcccgcccttgccgcccgaccggtcaaaccgtacatcgcaccccgcccgactcttgtcgagcgtcgagcgggcgaggtcggacgtccattgacgaagggcggcggtgcgcgctgagctgagcggggaggggcggggtgcgatgtacggtttgacggaggggtgaggaggggagggagaagcgcggcgagggacagagcgaagggcaagcgagtgccagggtcagccttcttgatctgtgtttggttggcaggagtcgccgacgagacattcgccatgaagaggagcagagcgagaagcaggacgagccagccaggcgagcgtcgtctctgctgctgctgctgctgctcgccgccgcccttactcccgtcggactcactcgccaaacgaatggacgaccttgtgccgccgcatcttctctggcagagggagcgtcccccacgacttgatcgaccggacctcgccgccgtgctccatgacgtgcaaagccgtcgagcggacgaggtcgcggagcggtttctggcggcgggcgcggcaggtgaggaagggggacaggtcagcttgattacagggagaggaaggcaaggaggaagacgtgcgaatttggaatagtgggatgcgatggcgacgagttcgtagagcggcatgtttgaagagctttatgcgggtgaggaaggagcgtacgagggagcggaggagaggagaggcagcagcagcagcaggcgacttttgcctccgaccgaccctgcgcgaggccaatttcgaccttctcttccctctcccttctctccaaccccctaaggatgccgaccaaccaccggaccaacgtcaagcccaacaagcctttcaagggccgccacgccaccaaatcggctctcaaagagaaggccaaaggccgccttccaggctcaggccctacctcgtcctcggcccgctcgcgctcggcccaccagccgagcgccgccgacggcaagcaggccaggcggaaccaggcgcggcagcttcaggcgggcaagcgcgcacgcgtcgtcgagggtcagaggctctttgcgggcaggcagggcgtcccgcgcattgtggctgtcgtcgagcttggagacgggctcgatgcgaggcgctgcgtgagggagctgcgcagcgccctcggcgaggagctttcagacgagctcgcagccggcgagagcgagcagccggtcgtcaacgtcgagtaagtccgggcgagggtgtccactctgttccggcttcgttcggtgcgcctcttcgaaaaagggcgcaaggaggaggttgtccggtccggggggtcgttcgaaagaaagaccgaacgagctgcgctgaccgctccgccccctcctccttctttcttccagcgcttcccgcttcaagacctcgctccagttcctcttcccgccgaagcgcaacttctacgcgatcctcgacgcctgcaaggccgccgactatgtcgtcttcctcctctcggacgagacggacgtctcagcctggggcgagacgctcctccgctcgctccaggcgcagggcgtgccggaggtggttgctgtcgttcaggtccgtttgccagccgtccttgctcccaaccgaacatcagctgatccgacctcgccctcaccctgtcgtcccgacctagtcgcccacccccgactaggaggggaggggggaggtcgaaggcgagcgatggccgtggctgtggccgtggccgaaggggagggcggacgaggatctttgccgcgcgtgcggtcgacaggtatgcccttttcagcgccggacgacgcccccgaccttggcctcgcccagaccccgcgcgacgcccagccccacgccgagcagactcaacacggccccggtccttccgctccccgagccgaagccctctgcccgccagccgacgtgcaagagcgcgaggccggccgagcggacgagccagaagacgagggccgagtcggcccctcctgtctcgaggaggggggcgagcgaggcaggaaggaggatggtcgagagggcccagaggacgagggcggagaggagcgcgagcggctcggccggccacgtagggagcgggtagacgaccgtcagccacttcgggcgcgccacgcccgtgagggaggacggggggccgtcgtagaggtgcgcgaagtcggtccgccggtcgatgggagcgagtagggggccagaaggggggaaggatgccgtgtgaagtttgagcggcgcgagcgcgatgaagagcgcgagcgcttcaaggcagaggagggaggccgtctgccagaatgcagggtgctcgaccgtcgtgcgcttgagggcgccgaacgcccgcgaagggaccgaagcgacgcgctcggccgtctcctcgacctgggcttttgcctgccggctgcgggaggagacggcccggcctgcggcgcgctcagcacgctgcgctacctcgacgaccttgaaccctgcgccctcaacgacgccctcgacgcgctcctcgacgccgtcgacgaccgccttcgcgcgctcgagctcggcaccgagcgcgcggcgcgcggtcttgagcggggaggcgagcgcggagagggccggggcgaggggggatgtgatggagtggaggacggacgagaggggctcggcgagggacgaaagcgggagggaggattgggcaaaggagccttcgccttcggcctccgcgagggcgtccgagtcagaggctgagtcgacgatggagccctcggatgacaatttctcggcgacggccacctcgtcgtcctcgtcgtcgtcgtcgtcatccgagctctgaagagcagcccgactaagccgactcgaccccctccgcccgggcgtccccttggtcgagaccgacgccgtctgctggctgtgcttcctcggcgacccgggctcggccgacgagagccggggcgagcgccgggcggtcgccttgctagcggcggaggcggcggcagaggaggcttgggaggcgaggtaggacgaggcgatgccctgcgccgcggggtcggacgcgtcagacgaggtcgtcgatgaagtaaggggcctattcagagcgatatgcaggtattgatggcacgtcagcctcaagccctcgaacgccctctcgccgcgccggcagaagggcaacgggcgggaagtatggcgaagggcccttgacttccccctcctcctctcctccctccccgccgctactgccggcgtcaacgacaagaccgacaaagacaatccctgcgccgtagaagtagtctgtgaaggactggagggtcggaatgtcgcgctgggggtaggtctggccctctaaacgtagaggatggggggcgaggggcgtcagtggagaacttgagtgagggcggaagagcgaacaggtggaggtgcaaaaaggatgggcgagagagggttcggctggccagcgaggacgcgggaatgaccagtcgggtcatgcttcgacgctcacatgagcccccacctctggaggcaagcaaggccggccgttgagctctcttcctcgccctgagctcgttgccagctccctcagccgctgctcgtctcgtcacccctctcctccctccttcctgccagggactgactctcgacctctttccggaaacactcggccatacactcgaccaatgccttgggcgtctgctccaacgttagcgggtagacgagcaggcgcttgcttgagggaaggctataggagaggagcgaagggagccgtctaaggtcgacgaggggcggggggatcttgccgtaggccataatgcgcggcgggtggtgctggtcgaggtgggcaaggtgaagcgattaggggctgaacagaggaaaggaggcggaggtgggctgaaggacgggcgagatgggctcaccgggcggagacggggccgggccggttccgggccgggttcccacgcagcgagcctcctcccgccagtcactcatgcccgtcgacgcgatcagttcgcaaagcctgtcgtgcgagcatggcagtcgagacggcgctcgctgcctgggaccgtcgagcgagtcaggcaatgccaggctgtcaagagcaacgacgaccaacatgacgccgatggatgacgttctgactctcttactgctctcgctcgcctctctccctccgaccgtcaccccctcctccttgcttgccttgcctcgcacagcaggcatgcgtcatctggcaacaacactagcatttcggccaagcggctactcgcgcgcttgtttccgcccgacgaatctgccgacctccaccacccgccgcgccctctcctccaccccgaccgcgctggccccatcgccgccgcagcagcagcacccaatctaccgccgtttcccgcgtgcgggcgagcagcccaagcccggtctgacgcccttccaacaaaggatcctcgacatcgagcctgcgcccggcgccagccctaggccgtcttcctcgccgagaggaggggggccaggtggcggaggaggaggacgaggaggcggagggggaggcgagcaaggcgccttcgccgccttttggtcggcgctcgatggaaggaagaagcttgtcgtgcttggtctggtaggcgcgagcgggtactacgtctaccagtgcgtgtgcaatctgctgcctctcggactgaactcggtggggactctctcgctgacccttcccccctcttcccgccctcccgtagcctgtgcgcgcaaagacgccctctcggccctctcacgcgcttaccagccctcgctaagcctgggctcgtcgacctcggtctcctcctcgctctgctccgcctcgtcttcgacgacctcgctcgctctccccctctcctcctccgcttcgtccacgcacaccgctggcaacaacccgccgctcgccagctcgtccgcacacaacgcccggcccccctcctcagcggcgggcagcgagcagcacgcaagccactatcggaggatgcacgccgagacgctccagctcgcggccgagcgaaacgatgcaaagctcctgcggcgcgaacggcggctcgctcgcgagcgggccgagagggctcggcagcagcagcagcagcagcagcttggtccttctcccgctgctgctgctgctgcgagaggtgtggccgggcccgtgccagcgacactggcggctggcttactcgggccgaacgggctcgcccggtcggctagcaaccggtcgggccgcgagcagatcgaggcccagcgggcggttgcgaggcttcagcaggccaagcaccggcgcgcccaacagcagcagcagcagcagcagcagcagcagcagcagcagcagcaacagccggtgccgagcgcgccacccagcctgccccggtcgtcggcctgctcgtccctcttcggcttgggtgccgacctctcgcggtccaacacggccgcctcgaccgcatcgtcggcctcgtcctcggcccactcgttcggctcgtcctcggccggtggttcgttcgtctcgacccatccgggctcccggtcgagcggcgcctatcggacgacagtgcccgacctcgtcgtccaccggcgagacgactcgcagtcatccgtcgcctcgtcgtcctttgcctcgttcacgagccattccgcaagctcgtcgatcggcggcggcggcggctaccgcccagcgctctcgctcggctcgtttggccacctgatcggcagcggcggcggtggcgacgggcagacggacggctacttggccgacctggcagaggcggacgagcacgcgtttggcatcgacgacgacgaggaggaggcggtcgagcgcatccggatcgtctcgcccctccgccggacaggtacgctcggcaaggcagcctcggcgctcaagtaccagcagcagcagcagcagcagggtcggctgcgtcctccaccccaccaccacgacccacccaccaccgacggttggcagcggcaagcggccccaaccgcgccgtcgtcggcggtgacgccagggatgcgcatgtcggacgtcctcgacgagattctcgagatggagcgcggcttcatcgtcggcggcagcagcggcagcggcttggggctcctcccaccggtcgacctcgcgagcccgccccgcccggctctgccgaccgcgggggggaggcgcgcaggggaggaggggcagcaaggggaggaaagggggtgtcagagggcgcgagagggacgacgacgacgacgacgacggaccagtagtagggtgccgggtcgatcccctcgcgcttgtagccgtcaagcagctccgccatatcggcgatcctcatcgacccgccgacaatctcgccgacgccaggcatcagcaggtcgcacgactcggtgtactcctcgtccccagggcacttcttcatgtagaaggccttgatcgctttcgggaagcgcgtgaggaacatgggaacgttgaggatgtcggtcattttgcgctcggccgcctcggcaatgtcgtcgccgtcgcgatggggccggagctcgcccgtcacttcgtcctcgcacgggatgtcgtgctcgatcagccagcggatggcctggcggtagtccatccggaggaagggtcgctggggggcgacaaagtctgggttgagctggtggatgagggtcgaggccttcggatcggccatgagccggtcgattgtcgtgcagatctaagggcgcgcccgcgcgggatgtcagcgagaggaggagagcggggggagtgtaagggagagagagagggggcgcacgacgtcctcgatgtgctcgagcagctcgtcaaacgtcaggaaggcaagctcggcctcaaggtgcgtgtactcgctcaggtgcctggccaaaccgcgagttgtgagtgagaggggggaaatcagcacactcgaccaagggcgtttcgaccaaaggggggccgccgtgcgagggaggaacggaccggcgcgtgaacgacttttcagccctgaacgactcctggatgcagaatacgtcgccgagcgagggcaggcacgtctcgaggtagagctgcgagctctgcgtcaaataagccttttcgccgtaaaagtccagggtgaagagcgtcgagccgccctcgacggacgtctggaccatcgccggcggggtgacttcgagcatttccttctgggcaaaggaggcgcggaaggacgagaggaggtgatgccggactttcatgacggccgaggccgtctcgccgcggaggaagaggtgccggttgtcggccgcgtggtcggcggcggcgtcctggaggggggcgggtcagtcggtcagcgacaggtacgcgaagggggagtcaaaagggctgtctctctgccccaggccgactgccgctgcctctcgtccggggagcgaacagcactgcgccctgaaggggggtagcctgagcaaggccagtcggcccaacgaccttgcgctcgcactcaccgccgtcactttgtttgaaaacgcctcgtccccgccgggactcttgcccaacaccgtccaccagtcggcgacgagctcgatcccgccgggcgcgtgtgcgccggccgggagggcctgaaccgtgccgtggacttggacggaggactcgaggttgagagttagggcgtcgagggttttgatctgcgcggtgaagggtggaagggggatgcgagacgagacgagacgagacgagacgagccgtgggctgacgagcgaaagaccccttgcgactgccacagcgcaccggccgtcatcccccctccgccaggtacatccttccgcggcggtcccgagcgtggtcgaggtcgtggtagcgccgagcgcggccggggtgctcgcgggcgtgggcgaggcggcgcagcggcaggaggggcgagggaggtcgacccgaacgcggggatgacggccagcggcgtcttttcgatggggccttcgcagatgggtgcgttcatcctgctcctgctgctcctgttcgcgtcttgccagcgtgctgacctctcgtgcggcgacagcgggccgctcacgctcctccgcggtccgcaccggtccctcccaattcgactccccctcctcctccattccctcctacaagcttcccgaagaccgcaagccgcgtgtcgggtccgacgaggagtactcggaccaggaagccggcgtcgaaattgtcgatatggccgatctcgagtcgctggatgtgatggcgccgacggcgctgcggcgcgagaaggaggtgaagaaggagccgagcagggcgcgggagggtggcaagggcaaaagtaaggcgctcgctagaggtcggtcgcccctcacccaccgctgctgcttgatctgcctggctgagactgacgcgcctttccccaccctcgcgtccgcagtcaaagccgaaccctcaggcgacgccaccccctcgtccatctcgacccccgacccagactcgaagcccgcctcccttgccggctcgctcgccgccagcctctcggacgatgagccagaaatgaccgaggcggcgattcaggcggcgcaggcgctcgacctcgacgtcgaggacgaccaaccggaggatgtcgtcgatgtacggggcgactttatcggctgggagggccaggccgtccgtctcttcccgcgctccccttctcgcccctgtcggcgctgtctttgactggctgactcctctctctctcgctttcgtttcgacaggtccccgacaaccaattctacttcttccagttcccgaagccgttccccaaattcctcccaacgccggcgctcgagccgaagactgagagctcagaaatggcgatggacgtcgacggccctgtgcccgcggcctccgggaagaagggcgtctcgttcgcctcggacatcaagaccgagtttacgtcggcggcgggcgagagtaagccagccctctcgaccggcaaggcggcggccactgagatccggcggcctgaaggccagattggcgagcttgtgacgacgaagaaggggcgggtcaagatgcgtcttgggaacggcatcctctacgacgtgcgtccctccccttccttcccctaccgtccgcagcgctccaagcgcgctgacgtcttaccgttcacccccccccccccccgtcaccgccttgaccatgggcctcgtctccaccccgcccccccaccagccggtacaggagctcgccaaccgcgatcggccggatgccgccgtcggccttgaggagcggcgtgagcctcgacgcgcaaaggagctgctggccaggagcgatgccctgggcgacctgccgtgtgaggagcagaacgaaggccgagacgttggcgttgcccagagcgtggccgaggagcggggccgtccaaccggaaacgccaggggccgtgtcaggcttgaacgagtcgaagcactgcctgatgaggtcgagcgacggcaaagaagacggagccgcgcctgaccgagggccgaagggcgagaccggaccgacggggtgcttggaggcaagagcggcaatggtggccggcgtgaggtcggcgacggacgagtcctcggcgagcaggcgagcggctcgactgagcttgccgtgctggacggcgatggcaatccgacgaggcagcgatgactccgacggccgagcgaccgagggggacggccagtcgacggcaggaaacgcggcgagatgggctttgccggcggcaggcgagacggacgtcgcgagctcaagcgccggagctaggcctaccttgggcagcgcgaggaagtcgaacagccgagcctcggttggttcctcgatgtaggccttagcgagcgagccagcaacgagggcgaatggcttggaccacgcgagagggagcggcttgtggacggtccggcaggctgccagggtggcgaaccggtcgacgaggggtacagcaggctcgacctgaggggtgtgcgaggtcgaggggacgacaggtcgagcaccgccgaccgaggcacgacgacgagcagcggcgggccgaacgacgagcagcgagccgtccgagctgaccgagctcgtgggtgaggcgacaaatggaccgggcgagccgagcgacgataccgagagggcacgaggacgggccggacgacgagctggtgtggcgacgaccggtggcgagacaggccgaccgtttgaggagctggtcgacgacgacgacgacgacgacaagagggaggcccgacgtcgagccggctgcgagaccgtaggcgcgcgacgaggagcgacggccgaggatgcgagccgagacgaggcggctggggcggaaaacgacgtcggaggggtggattgccgacaagcccagcctgagcacttggtcttgccttggtgcgtcttgatgccggcggtactgatggcgagagcaccgcagacgcacccgaagaggccggtcacgaggagctgcgagcggctgagccgacgaccggggtgctgccgcttgaggtgctcgagcaggttgacgtacgggttgctgcagagggggcaagcaaccggtgccatggcggttagggttagggtgtaacgggcatgcaatgacaaaggcgggtctatggacgggaggcgaggagtttgagagttagacgaggggaggagacggaagcagaggaagggagcgcaacttagaaggcgaaaaaaggacgccctctcggccgcagctcacgccaagacgctcaagtacgcccgccgggtgtctgctcccttccggccttttgtcctcagctctggcggtgcggtcgagtccggcggcctgaagctacttgacggctggcgcgagtccctcgctccttcgacctactcgcactttgtccgggtgctctcgctcatccttatcaaggctcggtcgcgactggcccggctttagtgcgcttctccggcttccgctccgcggcgccgcccgctttcgtctgtttcattttcgcttctcctcattggcctctctctcttccgcgtctcttccgctccgttttccttcacctccgcttcagtgtgcccgcttccctcttccgtagctctttctctcgcgcctctcttccccctctcgacgacccccttcttcctccgctttccccctaagcagccgacccgaccctaccccgttcgtctctgtgcccgtcccgcctgtccttgaccttgccttacactattcgatgctgcagtaaccctaaccctgggtttggagctcgttcgccaccggggtacggtcggacccgtcggccaagcctcgccagccatggctaccaagcggggccgttgccctcgctgtcgcacagagttcgccgacctgtgggaccatctggtcaagcggcacaaggacatcagctggtccgacaccgacctccgagggacgtctctcctcgcttgcccttgtggagccgtcgcccgctccatccatggcctcaagtctcaccagggcaaggtcaagtgcatcggccttcaccagcgtcaggccatcccagtcgaacctcggccggccctccagcggtttgctcgtgccctcgtcgttccggttgtccgtcacgccgcttcggccagctcggtcgcccctctctcggtcgcctcgtccttcagtgcgacctcagaccccgagctggagcctgtcgttcgtcgtgcctctactccggttcgtcgtgcttcggtgtcggttgcacccgaagtcatcctgctttcgacgtcgtcgtcggctcaggtcacacccgttcgccctcgtcgctcgtctgctcctcctacgccggtcgactggcgcgacatctcatggtccgattccgattgcggcacccctgtacccgagcgtgacgaccccacacccggctcagcacttgataccgaccaggacgaccaggacgacctcgtcgaccgcttcctttcgctcgtccggctcccgacggccgtcaagcccctcatcggctcacaagctcgcctctttgccgacgccgccgaacgcctggcctctgcctttgtcgccaagccctcggacgagacgctgttcgacttcctttgcctgcccaaggtcggcttggtccccggccttcgcgcagatgtcgacctcaagcagcgcctcgcggccttcccggccgtcgactggcccgagcttccacccaactcggcccgggcttagaggcggaaggttcgatagggtcagcggcttgggcgagaggaagcggagggagggaggggacgtacggcaggccttccacgagcggaccttgaggatccaccagagaacggtcccgagccgctcgacccggccgacgacccactctcgctcgcccctatcatcttgctcgccaaccgctggtaactcgccctcgacggcgacggcgggaggccgggggtaggcgacgagcgcccagcggaggagggcgtgcgtcgcactcaggagagggccgatcatccgcccaaggaacgggtcgagcagcggcggtgccgggaggtagacgtcgagctggcctcacatcgaccagcacagagatcagcccgcgccactctaggtcacaagaaggagcgaggagggggacagacaatagccccgagcgaatcgacgatcctctgctcgtcctttggcctcgccagccgcgtcgccggctgctcgtcgagcagcctctcgagcaggctaaagaactggctcgcatgctggccgctgaaggccgagaggagcgagtcgtcttcttcgactggctgcgggggacggtcgacatccatctcggctgggcggacgggtgggcgggcgagcgaggggcgcaagaaggggtcggcgtgaggaggagaggcgcgtcgaagactgcgcgcgcatcgggtcgggcagagtagtagaggagagagaagggtcgacggcaccggcggcctgcctcgtacagcccgagatggcagggctagttgaggctcgagaggacagcattcgagagacaaggtcgactatatgtgcggctctgcaaggaagaggaacgagtcgagccatggcagctggccctcaggcgtgtctgcctttgtggcttcgcgcgtcgaggccatctcctcccaacctcctcctcctcccacctcgcgcgatgtccttcctcgggtcagtcagacagagcaaatcgctgacaatcctaggcaagcagtctgacactctcgctctcttaccctttttccagccgcctccgagcgccccgccggccggcagcccagcccgagccgagcccaccgccgccctcgccctcttctgcccggcagaacgcctactcgcagcagcagcagcagcagcagcagtacctccagcagcaacagcagcagcttcagcagcaacaacaggcctcacagcagcaggtgccggcccaggttcagcagggcccgcccccgctctacctctgccagccatttgtcaagtcgaccgtcatcacggggacgttcaagacgctcgtcacgcttccgaagtatgtcgacccgaacgagtgggtcggagtcaaccgtacgtctttgcaagggcacgaggcgaacgagcgaggtagggacgggcgtgaggcaaggaagctaacgtgcccgctgctcgctcgccacctctctcgcacctcgaccgaccgaccgaccgacccgacccactcaccctcgtcctcgacaccccctgctcaacgaccccgtcccctcgcgtccgctcgatcgtcagacgcaggcgtctacccgtccgggccgggaagaggaggccgctatttccggcgggggtcgtctgtggggttgaagaggaggaggaagaagaggtggtggaggggggagggaggtgcgcaatgtggcgcatcctcagcgcgaccggcgctggcgcgtcggatgctgagccagagggaccggggccggcgagcgcgccgccggtgagggtcggcgggaggagaagggtgaggacgtggtggaagtttgagagggcgtgctttgcctgtctgtgaggtgtgccagcagccacgggtcgtgcaatccggtgtcagcatgtgcgtccccgacagcgacgattgggaagggggcggggcgtactcgagctgctcccagacggacgtcttgaacgcccgcatgccgtcgacgtcgagagtctcgtgcctttgatcttgctgctgctgctcctcctcctcctcctctagagtgtccatcgattcgccctcacgcagccgcgcagcgtccgcctcgcctcgtccctcgccctcgagctcgcccgacgtcgtcgacgcgtctgatgcgagcgagagagcccgcgagagcccggccgaagtgtagggcttgattccacccctttcgtcccagatccgacggacgagcgtccccagccttcggtcggccgtctcctcccttcggcccagagagagagagagagagagcgtcagagcgtcagcgcaagccatcgagcagcgagcgagcaaggagaggacggacgggcggaagaggacctcgcccgccgggccgaggtcgaacggctttgcaggcttgcccgtcgccggatcgatgtcgtctggcggcggtcgttcgaggcggatcgtcagggccatagcggaggaggtgatggtcggcggggagggagtcggtcgctcgtatgcagctgtcgaccatcatcaatatgagcgcacggcatcctgcgagtcggctccggcgggccgtccagggtgagcgcatacagccttctcatagcagcatgcaaggagactgacgagtggtagatggcagacggcaacctcccgctcgtccgccggctgctcgcctcgccatcgccggtcgacgcacggaacccggacggcttgtcgctgacgtcgctctcgtacgcggcgattggcgggcacgaagagctgtttgaatacctcgtctttgatatcggccacgacgacgacgagctcagccgggtgcgcgaggtagtgctccctgctagctgccgctgctgccctgacctccttcgcccccccgcccgacgacaggacggagacaacaacacgctcctccacctgctcgcctccctcccctcgcttcacctcactccgccccaccgctcgtccgccttcacttcaggcgagcttgccgtccgtctcgcctcgatctactacattgtggttcccttcaggctccacaaccagtacatctggcctgtctccatcaacaaggagggaaggtataacgtgcctatggaccccaaaagtggctactcgatcaccttcaagcccgaggccatcgagaactactcgttccccggcaagcctggctcctactgggaggctgccgccaagggagaacagaaggcttggaacgacaagcacggcaaggccgtccgcgactagacgggagcgagagcagttttctttacctagaggctctttttgtatgatgcgcgttctttgcaacttctcggtctgcctcaatgatgcaagccatagctcatcttggcccgtgttgcctcgtgagggtatcattaagagatcaaatggaagatagccgtcctcctaggcgacgaggaggacctcgccgacgtcgctgacgagtgcgagcgtagcgccagcgagtgaccgcgcgcgggcaggctcgcggccttccgagccggaagccacgagccggaggtcgagcgtctcgagcagctcgcggacgttgagggcgtaggcgaggtcgacgtagatcctgtagtggtcgccaaaggagacggcgcctccgctagaggttccggctgcctgagtcgtgggcgctggcgcccgacctgcaggtcgagcgtcaagcggcaaggttgaggagtggaggacgaccgagatcggcccgaggtgactcttctgggcgagagagaggagagccttgtgaaacgacttgaggagcgccggcgtccagaggatcgtttgcgggacagaaggcacgccggccgctgctgtcgatctctcggcggagctgacgaccgccggggccagagactgcttcgccgactgtgccacccgtatagccggcggtcgacgatcctgcgagttgctcctcgtcgactcttcgagcggggcgaccgtcggagtcgtagtcatcgtcgtcgctgcggccgcgacccgagccgcccgtgctgccttcgccgccttccgcagccgacgctcgataacggcccggacctcctgctcctcttcggcgtctgtggctagccagccgccgctcgcgaccaagccgccgaagacgggtccatgaacggggacgatccacttgccgcgcagacggccgggcgcgggagggcggaaggtggtcgagggcggcagaatgaaagggggaagcttgagggcgagctgggcagggtcggggaggtgatagattcggacatgatgctcgtgcggctgccgaagcgataagtaggaggtgcagagtccatgatcagtatgacaggacgagagtcatcgggcgcagatcgcgcaggtgctgatggacgcacgagcgggaggacgccgaagcagcggccgacacccggacggtggtcgccattgtcgagggcaggccgttcgaccttgcgcttgcgcttcagccgcgccgaggagccagatatggatggcgtggccgatggtgggagggggacggacatttcggccgggttgcggcatgcactggggcgagggagatcgtggtcagagtgtaagagaggtcagctgggtgtcttcaagcagtcgtccgaccggccaatcgaccgcagcctcgctgtcgacgacgagagattccgagggagggacaaagcggaaacgtacagccagtcgacgccgtcaacccagggcgtgctccgcgagctcgcccgccgctcctctttacgattccgaaaggcggccgggtcgtctgcttccagctcttggtgatggtgctgggagtgggagcgggcatcgcgctcgtcccttgacctctttggccgggcgctcgacgaggaggacgaggcaagggcgtcggcatggcgcgtggccgtactcggcaggttggatgcgatcgctgcagtgctcggtcttgatgagacaggaggcggcggagggccctctggctcgggctcgggcgagaaggagataaagccctggttggagctgaaggcggtcgaggccatcgttgccagcgtaaggggatgaagcgagcgagcgagcgacggcgcagcgagctgagggagggagggaaggggcgatgcagtaaagcagggtgggagtttgtgaacctctggccgatgcatcgacagcgaagtgaacgtcactcgcgaccctcgtttgcttccagcctcgtcctcgtcctccccttatcctctccctccccttcctcctttactccgcccggatgccggtccctcgactccgacccgcaggcctcgcaagcccgctcatccggcttttcccgctcctgttctccctcctcgcctctctcgcccgcgcctcgcccctctacccttcttccctctcacttgacaccgccatcgggagcacgacactcaagcgcgagcacgagttgacaaaggccgaatatgtcgagaagctcgtcatttccggcgggctcgtcctgctcggcggcgtctttgcagggtaaggtttcactcttgcgtcagaggggcagtgggagctagttgcaagaggggcaggtgcgggccgtgatgcgctcgtggcgagcgagggaggaaaggacaagggccaggctaggtcagccccaaccagccagccagccagccaaccggatagccagcgaggtctgggctacccttgcttcgcccgttgctgcctgcctgctcgctcgcccgctcgcccgctccagcgtcgttccatccctcagcccggtctctaactccctctcttccctccgcccgcccgcagcctcaccctcggcctaatgggccttgacgccctccacctccgcgtcctcatgacctcgtccgataacgagaaggagcgcgtctatgcgcgaaaggtcctcaagctgctgaatcgcgggcggcactgggtgctcgtcgtcctgctgctggggaacgtcgtgagtctttgttcgcgttgggcatcgtgcgagggggggaatgtgggacggtctgatgttcgtcaagggggtcggcatgtaaggggacagaagtggcaggcgttgctggagattcatgcctctttttcgatctgctggcaatcacccgcgaggcagaggagattcagagcagggcctgctgcaggtcggtgcctgatactgtcggacgccgggaagagtgtgtgttaaggaacgtcgatcgttccgtcatcgagtcgtccggcgcgctcgagcactgataagccctcaacgccttctgatggctgcgaggcagcctgacggcagcgtctgggtcgctttgggtcgagagcgccggtcggcactgcatctgacgctcggccactcggcacgagaggggtgcggtcttcagtcagggaagggttcaacaaccgaagtcggctgagtcccgctgcctgagtgcctgagaagccagagttgcctaagttgccctgagtggctcaaggtgaaagcagagcaagtcagcgtcaggccggcgcgggcgagggcgaggcggtcaaaggtgaggtgagcacgagtgtcaatcggcagggcaggggtatcatgggtcgccgggagggggtacgaatgcgcagagcaagaggtatgagtgccgcgagggtcgacgacgccgccgccagagcgaccagccgctctccttcattgccgcctctcaagcacagacgacagagcgacagcagaggacgcgcgcctgacgagcgactggctaccacagtcaacgtcgaggggccaattggtcctcccgaccctcttcgtcggccgcagccctctctgtccgaacccacccgacacgcggcaacacaccgtcgccgacagccccttttgcccctccgagcgaccagagacagcccgctcaggcccgccatcgctgcgtggttttgagagtcggcatcgcataacctgggtggcaagagaagggggggaggagtcgcctcgtttacttcttcttggcggcgaccgtctttccacgccggccggtcgtcttggtgtgctgtcccttgacgcggaggccccagaagtgacggagaccacggtgcgagcggctgtgggcggtagaagggcagggcagaaggagggcgcgaggagagagggaggagggagggaggagaaacgacaaaggtgtcagcgaccaggcgagcgagcgagcgagcgagcgcaagtgaccaagagagcgaatcgcgcgtacatcttcttcaggcgctccaggtcctcgcgcatcttctggtcaatgccgttcgagacgacgtgggcgtccttgccgtcggtcatgtcgcgctgccggttgaggaaccaggccgggatcttgaactgggccgggttctgcatgatggtgacgatgcgctcgagctcgtcagagttgagctctccggcgctgcaggaaggagagagagggagcggtgttcagcgaaaggggtccaagacgagagtagaggcgggatgcaaggcagggcagggcggtcgcgagggcgctgcgctgcgctgcgggaggtgggctgcgcggggagcggtctcgcttggcggtgcgaagcgggggtcgcacggccggtcggcggcgtcgtcattcgtcgcagcaggagcagacgaggaggagaaggagtgcccggcccgcgtgcgcagacgggcaggccaggcggggcaagccatggctagcaggcacacgctacgctcgctagcagacaaggaggagcgagtgcaagagagaaacgcgcaatggcggagacgtacggaaacgtgagaacaaactgccgaaacatgaacctgacgaacggcaagtctggcaggaccctctcgcgcccagtctttgggtccttgcccgcgatgaacggcctcccaagcgcggcgatcgcatctcccgcgccatgactgtcggcgtcggcgtcggcgtcggtcaaggccggatcggccagggtcgctagctcgtccatgaactggtggttgacgaggtactttttgaggtagtgtgcccggaggggcgtgaggacatcggcgtttgaggcgttgagcgagggtaaagaggacagagtcgggtggaggagggaggatgtcgggatgggcggccggcgagtgggagcagggagggagtcaaggtcgagctgggccagctgcgggcgatcatcgttggcaggaacttgtggcggcggacgggtcggccttgcgggtggattcgagtcgtcagccatcgtgcagagggaggggatggctgtatgcgagcgagccaaagagggcaagatgggctcgcagctcagcggcggagggagggtgatgattgacgccagcctcggtcatgtgccagcctgagcccgcctagaacagcctctctgatccctccctccctctccctctagccatcccatcccgcggcaagatggactaccttgacaaactcccaaagcaccccatctttcaaccccctaaagagggcttgaaagccccggttcttgtcgtcgtccgccagacagagcttatcgttctcgctggcgggtccgagctccggcttgcgagcctcgtcgacctcaagtcgggccgcaagggcgcttaccgggtgcgctgctgctctttcccttctagcttcgccatgagcgcgagctagcaagagctgacgtccgccgccctgatgactgcgcgcacgcaggttctcacatgctcccacctcaggcctccctcctccgcctcgggccagctgccgagagtgaccgccctcgtcctctcgcccgaccaaaagacgctcgtccttcgcgggccgcacacgctaatcgcgcttcggctccctcgggttggaacgtcgacgtcctcctcctcctcctctgcctcctcttcttcggccctcggtggtggctccctcggtggcagcggcagcggcggcgatggcggatcgcgctcaacgacgacgaccgccccccagcactcccctccggccggggaaatcatgtcagcgaaagtgggtgaagggggcaaacgaggcgcagggctgacccttggggcctgcaagagggatcgttcgccttgcgacgaccggcagtgggttctctggcggttcgccgacgggcaagctccgatcgaggctgacggccgtgacgctgctcctcgctgccgggccgttatcgagcggcgtgctcgcgctcggccagggcggctgagccgagtcggcaatggcctcgcccgtcccgggctggaggagcgtcgccgtcacttcgagtgcccactcgggcctcttctgctgctcgagcgggccgagccgttccgggaagatgaggtcgaggcacgagggcgaggacgtgatgtcctcccacgggatgacaatctgggcgtcgtatgtcccattgacgctcgtctggacgaccctgctccaaagtggctcgcgctcgccctcttcgctcttgcgctcgacccccccgcgagggagggccgagacgagccgcggtcggatgtcgagccggacgtcccggaaggggatgacggtcgcgaagaagggctggagacgggcccggagcgtcgcgtgcatctgctggaggtcgccccgccgagcgagcgtcgagaggtcgtcaatcgccggactgctgctgctgctgctgctgctggtcgtcgaggaggacgaggtggcgctccgtgttgttgaagcggacgagagggaggcctgggacgaggctgacgaggctgacggcgatgccgccggagggaagcgccctaaatcgtcgtgcgcgccagagacggacggcgagacaagtggcggcgcggccgacccggcgctggccgaccggtagttcgcgagcagcgccgacgccgtcgagctcttctttggacggacggcgtacggcgcgagtggcgcgctcgactcggtcgaggcgccgtcgatggtggtggtagaagggagaccgaacgacggcggctcgtctgtcggcgctttcccgtcgccgccaaagaacagcggcgggggcgggccgtcatcggcggcaagcggccggggctcgttcgtcggcgtccgcggatcgctctctcccaccgccagcaaggtgtcgagcggctcgggcgaggaagagagcgtccgatcgccgacgagctcgcgctcctctctcagctgacggaaaaagccgctctcgcccccggcgcccgcaagctcatcctcctccctcacgctcggcgaaggcaatgccgagcccagtcgcgaccccgcgcgagaaccaccgcccgccgtcgaagccgccgacgagggtattttggggaggtcggcaaaggaccgggccatgcgtgtgaagagccgctgggtgcgcgaggcggcggattcgggacgggcggacgaggcgaagagggagagctggaggcgaatctcgaagggcttcaacgcatccgctgaagggaggagggagggggggggcaggagtgcagcaccagcaccagcagcaccagcagacgatgttccacggccaagcgcagcagcagcaacaggggatgatggccaacgccggcttcatccagcagcagcagggcgggtacggcatgcctctccaacaacagcagcagatgttccccaccgtcggaccctcatctatgcaacagccacaacagccgatgggctttgccccgcccccgccaggcttccggtcggccccgtccgccggccaatcgctctcgcacgactcgcccggcggcggaccgagctcatacggcgtccggccgccccagcagcagcagcagccgatgatgctccagcctcaacggactgccggcgccggccctggtgggagacgtgagcgcgcgccggtctaccgcgcagggtcgaccgcaagcggagggccggcagggctcatgctcgctccgaaacgcccgccgccaccgtccttcatcccggggatgggggccgatgcggtcaactcggtccattaccggccgccgccacctccaggcggagggatgatgatgcctttcggccaggcgggagcgatgccgcccttccgacctccacctcccgtgggcggtggcgggttcatgccgcaagctcgccctccaccgccaggcagccgcatgccgccccggccctagcgtcgcctcgcgcttgatatctcctcttctatgcccctttcgaacagtgccccggccgcttgtttcgagttcggcaaaagcaaggggaagaggggtgggggtctatgcggagccttgatcctcctcgctgactagccagccagctaccagcgcgcccagacctcgaccggcatcaacgcccgcatcgcccgccacgtcgccttgccctcgcctcggccctgtaagcgcctgagtcgctcgcccgcttcgccccgcctcaacacctccccctccccttcacgctcgccaccaccgctgccgccgccgctaccgggcggcgagtcgaggagcttgcggaggtcgaccgggtacgacgtgaatgagtcgaatgtctgctggcggaggcgcgagccgtgtgtgtcggcttgggtcggtcggcggaaggcgagggtcgactggccaggagcaagggggaagggcgtgcagaagatgacctgtgcggtcgcacgtagcaaaggggggttgatgagttgacgcgcacagaacgcctagacgaagagagaaggggggacgttacgagattcttcagctcctcctcctcctcctccccctcgccttcgcctcgctcctcgcgctcgccaagaacgtctctgaacccctgacagacctcccaactcctcatcagcgtcctgaggacgactcttgcgccctcggtcctctgaaggcctgcaaagttgacggcgagcacgccagagggcgccataagcgatcggaggtcttcccagaattcctagaaaagcgggcgagagcgcggtggcgggcggagggggggagacggacgtagacaatgatgacgcgtggccgcgatggcaggtcggccggcagcggcggcgggtaggcaaagaggtcgaccgggtggaacgtgtacggcagggctgggaagccggccgattgggcttggctgagggcgaggctggcgaactgcacgacggcgggggtcgtcgtcgtcagatcagtcagagaaagcgcaggtcagctagaggaggggcggaggccatcgcacctggcgctcggtgtcgatcccgactaggcgagagggacgaacgcccctccgagcgagctcgagcaggtcacgaccaactgcggagcagggcaggacagggacgaagtcggtcagccaaagggttagcagcgtcggcatctcgcccgttcgggcaggaaggagcccttacagccacagccgacgtcccagatgatactgcctgctcgagcatcgtcgtcgtcgtcggcagcgtgagcgagttcgagcacctggtcgaacgcagggtggtcggccgggcggagcgcgagcggcggcggcggcgagggcggcgagggtaagtaggacgatggcattgtcggcgggggcaggtctggccctcctctctctgtctatgtgcgacgggagcccgcagccctcttgtgccgccgaactgcggtgggagtcagaggtcggcgggcgttgcctcggtgggctggctacctcggagccgttgccaggcgcaactcagctggatcaaggccaatctacttcagcattgcggatcgactctgatcgactttgatgtcggccaattcaggctgggactttgccctatgcgcaggtgcgcgcgcacctcgtcttgcccctgaccgcttccaccgccgccgctgcccggccaccaccttcctctctccccccttcccgcctgctgaagacggcgcacaggtctctcgaccgaccccaactcccgcacacacccaacaccagacgacgcttcgatgtgctcagtccatgtcctcgtctagatcgtccacggcgaacccctcccaccaacaccagcgcacgacccgcgcctctgcccggcgccactcgctcgcctcgtcctcgcccctctcgtccgtctcgtccgaggcctcctcatcggttgaccctagcgccacctcgtccgccaccacccccgccaccagctccagcaagaagcgcactcgtgcagaggccgacgcaaccgccgacgcacagtcatcatctctcgccgccgccgccgacgccgcgtccagctcgagcggctcgcttaaagcctcagcaaagggtgaaggctttgccagcagcgagcagccgccgccattcaagaagtgagtccccgtctccagatgctcggtgcctttcgaggcgaggtgcgggacgggaccctgtctcgaggcggccgcctcttgtgatggacctcgcagactgaccctcctccgcccaccctccctttcccccctcgcaggctgtcaagtcctccctcgcgaccgcccagtcgaccctcgcctccgcctcgtccgagctcgcaaaggccgaggcccagatcgaggtcgacgtcctcaccgtcctcgaggctgccgtcaaggcctaagccttgcgtgcgtgcggtgtcaggtcaaggagtggagagggggtgaggttgaacatatattggaggaacgggagctgagatggatggatgggtcctgagcaagatgagctcggatgagacgactccgccagcctatgcccatggtcggcgaacgttctcgcacgcaaaaaagtcagagcagagtgcacgccgttcgtcccgaggggaagggaagtcgttcgtctcgttgagaactgggagcctgacaggggaatcgagagcgatccgtcttgtcgtccgccagatcgagcggagtcgtctccttctctcctcgaccatcgacccatcactctgcccctgaccctcttacgcctcgtgcaaccctatctctcccacgcaaccctagacctgcacccaacgaccgacgagcttcggacgatggccgaagaggacgacaatgccggctggagcctgaccgagtcgtccgtcctcactcctcctttgcctggctgccctcctccccttgtcgtcgctgcctgccatcgctcgctccttgcacttctgcgctgctataactgaacgctgactctcgaatctgccccttgtcctctgccccgctcacgtccctccctcttgccggcccttcgctcgctctcacctcgccctcgcctcgtctcgtctcgcctctcgcctccctttccccctttccctccgccccgctccttcgcctcaacctcttccgccttgcccaacctcgctttacctcgcccggccgcccgaccgcccgcaccccaaagggacccctccgtcttcacctcgctcctccaagggctcggcgtctcgggccttcaagttgaggacctctggtcgctcgatgacgacgcgctggccgaggtcggcgagatcaagtgcgtttgttgaggctttccttcctacctttactcttcctgctccggcctgagagctgtcgccgggagtgggagcgatcgacgaccgactggctgtcctgttggtcggtcgcggtcaaacgatgtcctgcagccggtcccatcgcgctcaacggccgatccaatccacagcgatgctgacaccccccccctcactctttctggcgcagggcgttcatcttcctcttcaagtacgaaggcggcccggccgcgtcggcccggcgtcaggggacgctcgatgccgactatgcgggcttcttcgctcatcaggtccgtccggttgcctgttgcgcgtcgtcgcacttggcgctcggtcgctcgcttgcgccggagtcgggatgcgtttctaggaggttacttgagagaaggagaagcggagggccgggaaaggaaagtttcgaagagggaggaggtgaagggttggcgagaaggggttcagagggagaggcagatcaatttcagcagagcttgttgcgggcgggcgagcagcgcaagggagggcaagataccgtcctaagcgcgcgaggggataaggaggggatgggcagggtcagcaacgagcgtgcgcatctttatgggcggggtagacgaacaggatccgaccacatgacgtctgttgcgagcaggggcgaggggagaaaggaggggtcagccagcgtctcccgcaggcagccggcgagaccagccgagagggcgcagctaagggccataccgcaaaaggcgccctcatgcggaatctcctgcgcccgcgcaatcgtccggatctgatcgatcgtcctcagatccgggctgagaccaccatggacgcaaagaacctcgccgtcgatgagggcgccgagcgggaggtggtcgaacacctggcagcaggccttccagaccgaggcgttgccatacttttgctggcactcatcgtaaaagccgtagacctgaggggtgttggggctgggtgtcaacgaaggccgtgggggtgagggacgagggagtctcggtcgttggaaggctggtagagagacgagcgaggggcgcacctgggtgatctgccgcgactcgtggttgcccctcagcaacgtcaccttgtccggatacctagcgcggtcgagcgcgggagggaggtgggcaggtgggcgagaggagcacgtcagtacgggaagcaccaactgctgagccgccgagcccgaggaagctcgaacgaaccgggctttgagggcgaggaggagcgagagcgtttcgagcgagctgtggtgcgacagggagtcagaagtcagagcgagagcctgcgttcgcatcgaccaggcgaggacgtactagagcccccggtcgacaaaatcgcctgtgtcggtcgaagcctccatgtcagtccccatccctctcatgccggtagtcctggttcagcagcacgcacccataaaaacgtagctcgtctcgggacacatccccccggtcctcaagagctcaatgacgtcccagaactggccgtggatgtcaccgcagacggtgacgggcgcctggaccggttggacgttcgactcttcgagcaagatcgactggacgcgagcgcagagcgctttgatcttggcttcgggcaggtgctggatgacgttgaaggggggaggcgagagttaggcgacggaggcggcggcggagacgagggggaggagcgagggaacggaccctgcacttgagcaggtgcgagatgattgggtcatccgactcgagcggaacgcccatcgcttagggcggaagtgtaggagggaggacgagctggaggcctacaggaggaggaggggcgacggagcgaccaagggggaggtagtcggttgagctgctgcgcagacctcccctgcggctttcgtctcgcctcccttgtccgtcctggccgtctcactccttcgcagaaggaaaggcatggatcagcgtcagctcgaaggcagccacccacgagcatctgccatcctgcgaggacttggggacgacgtgcagcattgactgctggacggcccgccgacgtacgcgcggcgacctgctgctgagcgcgcgtcgcggccgcggcgtctttgccccgccgcctcgaaacggccccttcgtcccgccgtcgccgttcgctctcgctgccaacaccttcccttcccgccatgctgccaaacggacgacaccccgtctctcgtcgctcgttctccaggatcgtgccttcttgacggcgtcgccacctcggtcggccgcccgcccgccaagaaaggcggtcctcggccagctccgccctcgcggtccggtcgacgacaacaacataagcccgctcgatcattttcggtcaacgcgagcgccggtgcgagtcattcctcttgctgccggatggaggggccaggccagctcactgaaccggcgccatcctcccagcaggtcagtaggctcggccgacgacaggccagtcgattgactgagagcgaaaagagccgtcaggcacctcgacgccggtgcgtatcctcgccctttcaaaatcctcgcttggccggctcacctgtcttcagcatcgtagcaggccatccagactgacctggcgccgcctcgcctcgctgtgctgcagaacactcgccagtcatccttctcatcaggtcgaccgactggccgcaggcagcccaacgacgacgctcataccccgcccgcaggccgtcgccagcgcattgtcgccgcccgcccggcagcttggcccgcgcgcgcatgcgctgcgtcagcgtcggcctagacggctggcccttctggccgcaactcgcccgacgaggccggctgactctgcccattggcactgcgagtcgcgcgtcgcgatagcatcgtccctggagcagcgccgttcgcatcggcacatgtcgcgagggatgccaggccggcgtgcgctgccctgcccgagaggatccctggtcgcaacggccgtacgcacgaagggtcagcactgatcgacctcgtctcttcttttctccaggcgcaaagcaatcaggcacgtcgagcgagtcgtcggcgacggctttgggtcgcgcacgcctggcagcagcagcagcagcccgtcgaccgacctcgcagcgagcgtctcaagtcgtccgtgtctgggcggccggcctttcgcgcatcccatccggcctgctggtacgttaagcgtgcggctctagaggacgcaccagttgagccgccttgccggagcggtcggccgcaagtcggcgccgttcggctgttcggccggcgggctggccgaggcggtgttttttttttttttttcaagcagaagacggcatacgagatactgatcggtctcgtgggctcggagatgtgtataagagacagcctccccctctctctttctcatcccaccgaagggtcggctaacggctacccgatcggcgttttttcagccggcagcagaggaggacaggcttcacgttgcgtcaagaccgacgccgcagcaggagcaagacgcacgcaacccctctcggccagccaccttcggcttcccgtccgcttgattgctctcaaggctagagaaagagaaaggtcttcgcccgcccgtccatcggccatcttcttcgcttcgctctcgtcgcttcgtctcctcgctcggctcacctcgatcgctcggtcggacgccctttcaaggcactctcgcagctcgatccgccaagcccttgctccttcttcttcgaaagcgacgggcgctggtcgtccttgcctcgcctacctcatcctctactctagcccgctgtcagtcacccgtccgtcaagcagtcgaccacccatcctcgatcaacacatagtggtcaatctcgagccggtcctcgagcgccctccttcgtcggtcaacttgctctccaggcggcccctttcgcccgcgcgtcatcctctggcctttcctcttcgcctctggcccgtcgtccgccttcgcctcatcttcgccccgtcgttgtcgctcctcctatctccaacaactctaacaaaaaggactcgcaggcgagccccccacgcaaagcaacgaaaaaccaaatcggaatgcaagtggctgaggagcgcgaggctggtgctgcggacgaggagcggcctgtgcctgtgcctgcatctggtgctggccctgtcgtcgtcgtcggtgatgccggccagcagcaccagcaagggcagcaaaagaagcagcagaagcaacctcgtcaccagcaccaccatcagcaggagcaggacttccagcagcagtactccgcgctcgcacgcgctctcgcacccgtccccttccctgccgcacccgccggtcccgcagcccaccacgcaaatcccattggcggccaccacagccacaacacccgccggcgccagaagcggcgcttgtttcctttccgccgtcggccggttgacgacaacgcccaagccaacgccatcggtgccggcgctgccgctgtcgccaatggtgctgctgctcacggcgtcgctcggtcgggctcgggcgagagccaggaatggcagcgggaggtgggactcgggccgggggagaggatggcggcgggcctgtcgtcagtgacggcaggagcagcagcgggcgcagtcgcacccccgctgcttccgctaacactcgccaacctcgctcccgtcatccgctccctctccgtccctccctcccctccctccacccggtcctccccgtacccaacatactccgggtggaggcgagggagggggtcagcctaaggaggcttagcgtgcgagggtgctccagccagccgacgcacagtcatgtacgtcccgccgatgaccgggtccgagatctgcgtgtggaaggccgagatgccgacaaactgcaccgtgctggagcggcaggcggaggcaaacggaaagtcaattcccagcttcgaaagcgaaggtcctcggcagcagatgcacgagcttgctcgagtcggaagaaaagcgcacctggtgaacgaaccgaggacggtgaagccgacgacgagcaagaagtaggcgtaagggatcggcgtctggcccgggaagccagcgacgagggcgatggcgaggaggccaaacgcgagccggacggtgtaggccgtcatccagggcgtgagcggccggggcccggtcgaccagctcgcggcgagcctagttcgcgcacgcgagtcatccgcgtcaacatcaggtcgcagcgcaggagttgaaggggccagtgaagggggaaaacgtaccagccgccgatgatttggaacgggaagtcgataaggactgcgacggccatgtcctccttcagcaggcccttttcgagcagcttgagcgacgtgacgctgtcgttggccataaagccaatcttggcgatcaagtggagcaggatgaacttctgaacgtctgggaggggttcggcggcggtggcggcgcggtgagcaggtcagcgaacggacgcggttaagtcgaggttaggttgtcggacgcacgcttcagcttgatgatcgaccacatgaccttgtagacctttttgacgtccatcgacggctcgtcctctgctacgggatcctgcgacgcgcaaggaggggggaccattcagtcaacgcgtccttatttccatcgagagcgttgaacgaggggggtcgacggcacctccttttgccggaagaggagccagagcgtgacgaggaaatagacgagcgaccaggaccggaggtagctgccgagcgtaacaagcggcgtgtcgagcgggaccgcgcggaagtacttgttgctgcggggggggggcgtcgagggcgcgcacgtcggatacgaaacgtgtgagcctcctcctgcgaccatccaagcggaagaagggagagggaagagagagagaaaacgcacccaaactcgaccgaattaaacgccaaaaagacggtaaagctcatgaagtagccgaggttgaggccgatcgtctgggccgtgctcgcatagctcaggttgcgttgcgagagaagggtgagcgcccagccgtcgacggcaatgtcttgcgtcgctgcgaagaagatgagggtgacgaagatggtcgtgaggaaggtaacggaggggacgtccttggggcggcggttgcgcgggggtggggtgggggaaagggggggggggggggtgtcgggccgctgctagcagcagcagcagccgtcaactcaagcaagaagcgttcgctagtagtagcgctcgaggactcgttggcatcatcgtcgtctttgaaacgccctcgacctctctctccgacgaccacctcctcgtcggccggccttcctgtccgcgcaggtctctcgtcggccctcaccactaccgccgctgccgccgatgacgacaaagccggccggaagcgcaccaagaaggcagagacgaaggctgcctcgcgcgctgcaaaggccgagggcaaggccttgcggaaagcggcgcgcgaagagaggcgggctgcgaaggctctccggcgagcagcgagggctgctgctggggtcgcgccggaagggggtgcgaagggcgggacgggcgagtcttcagccgacggcgaggcgagcgattgaacgaccttttggagaggaggggaggagacatgggatcttttctgcgggtgttggcagcggacgagctgagctgagctgagctgagcgattggcaagttggatgggtggggccggcacgagtgggctccctccgtccctcttcttcctctcgtctggcttctcccgtgagcgagccagaaagggcgccttcgctcgatccacagaccacccatcggcctgtgcggccgaccgcgagggaggctgcttgagccgtcgacgctccgtactttcagatggctcgagatctgaggaatagggcaagggcaacgcgaggtgaggcgagccgaagccgagccgagacggacagattggccggctcgagcgggcacacgagcagctaggcccgggcgagatcctgcactgcacgattcgacccgctagtcggatatggttggtcggtcggtcagacgatagaggacgagagaaacgcccaagaccgaggacgaggacgagccgaaccggaccagctgggctcgcgctcttctcaccaagccgcctcactcgcccagcagccgagctgacgcaagggctcgagggaggctcaggctttgctgccttgcccaccgccgctgctcggggttaaggtcgcgctgtcattgtcgtcgtcgtacgacatgccgtgtgtgcggaggttgcgtttcaaaaccgactgaggaagggggtgggcacgatggccaagtgcgagcgcgatagagcacaccgtcagcgagtgaatgcgcagacgtgtaaaaggcaagcaccaggaaacgtacgaccatcggacaggcctcgccgcccttcaccgtccgcctgagcccatcgacgtccggctcgcccctcttctcgagcgccttgtagagcgtcttgcaacacgcatagagcttgccaatctcttgctggcagcgggccgagtcggagctcgagcgcgaaaggcaggattggatagcgcaggcgaaagggtggcagtcgggtagggcgccccctcttgacccctctacccatggactctttcctaccctacttctacgcctttcacgcacattgttcaagaacccatgaggaggcctgcgagcggggcgacgtcagcagctcagggcgtcggaggcacggaggcaacctgtcgagcatgcatcgagcgacccggaggcggcagcgcgttcctcagcccggcttgagctcctcctccccgacccgtcaacgaccagccctctctaccgcccaatccgtcagcaggcagttttccaggatgtccaacgctcacgtgagtgctccgttgccgcttctgccgtctttgagcttgcccgatggctcaccctctgcgacccccccatgctcgacccttagcgacctacatggagttcgtcctcactcccccttgtccttcctcgaccctgaagctccctcgactgacgcatttccctgctccccgccagacccggcccaaggccgcgagatcaaaggcggctcccgccagttttccaacaaagacctggccgcgcacacgaagctcaagttccgccagccgggccagacgtcgagctctgacattgcaagggtcgacctgagggcgcagctgctcgttgcagagcgagcggcggtcgataagaaacggaaggcgcagggacttccggctctgcccccattggtcctgccgggtcaggaggtgagggcgattgagggaggtgtgggcggggaggaggaggacgaggagagtcggaagaggcggaaggtgctcgaggaggcggtcgcgctcgaccgggacgacgatgacgacgacgacgacgacgaagcggagggcagtttcaagagggacaaaggcaagggcaaggccgtcaagtaagttgttctcgtggacggctgggcggcagctcgaccttggtagcggcgctgacctcccttctctcttccggcagcaccggctcggacggctccaagtcggactctgacgacgccggcgacgactctgacgactcgtcgtccgacgatgacgaagacgatacggccgagctcctccgcgagctcgaaaagatcaagcgcgagcgggccgaggagaaggcgcggctcgaagcctcgtcggccgctgtcgagggcgcctcgcgcgaggaggagatcgcgctcggtaacccgctcctcaacctcgctgctgcgctcggccagagcggcagcggggcgtcggatgcgggcacgtcgacgacaacggggttcagtgtaaagcggaggtgggacgacgacctgatcttcaaaaatcaggcggttgggagcgaggacaagggccgcaagaaggagtttgtcaacgacctcctccggaccgactttcaccgcaagttcatgggcaagtcagtgcttttctgcgtccactcctctctcagcctttgccaagcgctgatctcccccccccagcgaccgccctctccctccctcaaagccccgcacggcagcaccagtccttctctccttacactctctggccaaacgcgtgccgctccccgctcgtcagcgccccgcccgcctgtcgtccgttcctcggccgactgccctcgtcgtcacgaacccgacccgctgccacggaccttgtccctcaaaccaagtctcagacccgaccagtcccatctcgaccggctccgtaacgtaagtccagatgcatctcgtctggtctgcctcgccgctactccagaaatgacaacgtcggtagaggcgaaggccgtctgtcggcagcggcagcgtcgagatgccatctcgctcgagaggcgatcgagttgcgagggtcgagcgagcaagcagccctgcccagcgtcgccgagcttggctctgctggcacccggcccctcagtgactttcctcgcgtgcattagagctcaagcgtactgacggtgtacttccttgtcgctggtgccagcggtgacggtgacatcgacccgttgacttcccttccgagtgcagagtgaagccttccttccctttgacgggcgacctcgaacacagccggtccgtccccaatccccgccgcacctagggacctgctaattcatcgtctcaccttccagtgcctgctatgtctgaagcggccaaggcgccctctgcgccaactcctgctcctcctacctccacctccacctcggctggtccgcagccgactccagcgccaaacgctccgaagggccggccgaccgcccctcctgcctcgcgtaccaactcgaacaactcaaacgggagctccggcaacaacgcccgtcgcggcggagccaacgctcgcaaccgcggaccaggcgcggccaagaaggagccctctgtcacccctgtgacggcgacggcggcctcggcctcgacgccatcggccgccgccacgactgctggcaagcaagcctccactccgcccgcctcgacatctggtggaggaggcggtgccgccgtcaaccgtcgcaagttgcattccggccagcaggcgaccggccgcaatgcccctcggccttcagcgccggccaagcagaactctgccccgagcgtcgctgtcgcggccgcctcgaccggcgccgccgctctagctcctactgcgacgagcgacaagaatccccgccgggttaagtctcctgccggcgcaccaacagcggccaagggcggccggtcgaacagcaactcaagtgcgccgaccgccgctgccgccaagggctccgacatgcttgactcgctcaagcgcgtcatcaccgacctcaaggcaatcccgccgaccgcgagcggcggtgcggctgccgcaacagcctcagcagacggcccggaatcacaggtcaaaaaggccccgtcgccccaacccggggaagggaaatgggctggccctttcgctgttgtgcgagagatgctaacctgcgccaagctttccgccctcgccctcgcccgcgccgacccgtccctactattgacgctcgctcgtccccgctcggacggcagtacatcctctcgaccctcggctttggctatccgtgcttcttgacgacgtgtcacatggcttttgcggtacgtcgccccctcgctcgtgttgtccttttcttcctcgctcgctccttccgcccgacgaaaccccatcagattgtcgattccggctaactcttcctctctccgcgcggcacgtgcaccgctcaaaggtcatcggtacgcgtctcgctcggctgctcttcccagggcacgtcggccacgggcccgagaaccacttgtcggttcgtccccacgtcttgttctccctccctcgcctgacgagctccgctcttgattgccttgtcgctcggctcgccgcagcttttggctagagccagcctttaccccgcacccggcctcatctgcgccctcgctcgccccacgccctcttgaccctgacgtctccctcttccacttttcccttccccgggccagtggccgctctacgcccgctcgatcctcccaataggcctccttttctcgctctcgctcgtcctctccaacgccgccgtccagagactgagcgtcgcgctcgtccagatgacaaaggcgtttattccggcgctgatcctagtgatgagcgctgtgggcgggctgagacgtgcgtttccggctgttcttctttcggccttgcgtcctgctatacggcaagccggcgagaggctgatctgacatcgtacccctccccgccttccaacaccaggcctcgaccgcccctccctcctcgccatctccctcatctcgaccggctgcgccctcgctgcgctcggcgaggtccactttgaccggctcggcttcctctgccaggtgctcgctgtctccgttcgtccctccctccttctcaagctctcctgtctgctgttggagagctgacgggtgcatatggggcgtgcggaggcagagcgagagtcttcgagtggtgttgatccagttgttgctccaggggcacaagatggacccgctgacaagcttgtcgcactatgcaccggtccgtcctccttcaccgcttggtcgcgcaggcgagagctcacatgctgatcgaccgaccgtgtctcgccaggtttgctttatcctcaactcgagtttgtccgcaaccgctcggacgtccttttaacgcccgcgccttttgcctgaccccaccagcgcccatcctgcagtcctcaccccgctgatcgaaggccccgccccgctcctcgcccgcttcccctccctttcctcccccccctctccctctcgctcgatgtctagaccgtccgcccctccgacgcgtcaaggcctttgccggcggtcgtttcgggtcgatgagtcttcacctacggtccgacgccggatcctgaggtgaccaagtttaaggcccgctgggtcgctcgcggcttcgagcagcgcgacggcgcctttggcgagacctactcgcccgtcgctaacggcacgtcacgccggacgttcctctcgatcatcgctaacgaggaactcagcatccattaagccgatgtcaaaacggtcttcctccaagccaagctcgtggagccggtctggatgacctcgccgcccggctacgcagccccgccggacgacctctaccacatcaccttggccgtcgaggcctgcgtcagtcgcccaaggccttctacgaccggatcgcctcgttcctcactcgtatcgacatggtctcgatcgaggccgacaagtatgtcttcctgtaggacgagacaggaggcagggccgactcagtctcaggactactccgtgaacgactcatggatcccacctgtaggacgagaaaggaggccgggcagacgatgggggtgagctactgcctaggctaaggggactaagactatccggagcgaacgtacctcagtctcaggactactccgtgaacgactgaggtttaggagggggagcgagcggtcgtctagctaagaggagggagcgaaaagagagaggaggaaagagtccggcggactccagggcgtggcgcccgggtggccgctgggcggtcgtcaggcgctggcggcgcgcccaggttcccgcgctgcgcccagccggtgccggcgcagcaacaccttcaacacttcctcggttagcaaaatggccagaaggtcctcctcgtgctgtacgtcgacgacttggtcgtgctaagtctcctgagagctgttgaacgggcgccgagaccgctggagacaccgcaaaactgggagcacggtgagcctttggtcagcgcacgcatggacaggaagatgggtcagctcttcataacgagtttcgccgccacacggcgggcaagcgtcgactgtcttcttcctgttggcagtcagttgcagtttggtgaccttccttcaccgcctctgaaagatgagcgcctgcgtgtcctgtcccttttttgctccattcgccggcgaccgacctgcatgcggtcctagtttctttgccggcgtcgtccttcaactcgcaggagcaattaaggtacacggccaggatgattccggccgacccatcctttcgaactcgcgtgatccagcaagacttccgccagatgcgcggtgagcaagtcagtcgggaggccggttggagcccaccctacctgacgggcaccagactggaagcgagaggtgcattctcttctctccccgcccgcctgccggaaagaaagtcgaaggagaaggacaacgcacacgaccgaccgtccccgccagtggacccaagacagccagcgtccctacgaagggtcccgtcgtcggcccgagcgtcgaggcgctgaggagggtgactgcgcggagtgttgcaggcgctaggagcagggcgaccgacgggcccaagtgaccggcggccatcgttcttgtcaagagcgagaggagcgatgctggccgtgccgagtccttgataggagggccagggcaggaagcgagtagagcagcgaggagggcgaagaggagagggagatgggtcggccgagcaagcgggccgccgaaggcgggtcggagggcgagctcagtgagggctgctgcgagcggaagggaaaggaggacgagggcgaagtggaagagggcggggatgctgccttgtggcttggtggccagggccatgctgccgacgttgatcgatgcagtcaagggaaggcaggaaggaaggaaggaagggcaagctcgacgcccgaccctcgaacgacgactctcgccccctcctccagtcagccagtcagtcagcccatcctctcattcagctcaaagacctctaagctcgatcccgtacatggaatgctgatctcattcacctcttgcaccgctctctggcgttttgccatccttggccatctccacccacccacccggctcttccaccgcagccaacccacacccacacaccaccacatcctcgcagcagcacaccatggtccgctccaagtttaaagacgagcaccccttcggttccgtcccctcctcctccctccttttcctgcgttgctctcgtggttgccatcggaaagagagagagagaactgaccatctcgccccttcccgtcccactcgcgcgcgcgcgcgcgtctgcctgcctgccgcatgaccctacctccctcccgaaccacacaaccgacgacagagaagcgccaggccgaagcccaacgcatccgggcaaagtactctgaccggtccgtcgttctccctttctgttctctcgctcgtgcgcatcctcgtgcgaatggacgaggaaggctgacttgacgaggagtcggatgggacaggatacccggtgagccgctctccgtcgcacgcgggtcggtcaggctgcggctgcggccgcgcgcccgtcgctcggccaacctacccaatccggccatcgctcctccctcctctgctcccaaagagctcagttgacaccccctcccccctccccattggtgcacgtctttccagtcatctgcgagaagggcgacaagacaggtgccgtccccttcctccctcgttgcgaatgcttgcgcgcacatgggagcccctcgaccttcgcctctcgtcaggcgtctatcccgacgtcgacaccgacgttaccgacggcaatgcttgcccccgccccgctggccggcaactcgctcgagtcgaccctcgccgagtcgaagcggacgctcgaggcgctcaagcggctcacgcgcgaggcaggcacgccgaacgtcgtccctccgcctccgaccgccggcgttaccgctgtcaacttgaccgccaccactactgccgccaccgccgctttcgatccggccgccgcgctgccgaactcgaccgcccacccccaagcagcatcagtagcacccaccaccaccccgctcgtcgtcctccccgcaaccgagacgctcgccctccttcgctcggctctcgccgagcaggccggccggctcgaggctgtcttcggcggcgagctcaaggcgttcatcgagggcttcttggagaactaccgggcggacgcggacgcgggcccgggcggcgggggggaggcgggaggcgaggaggcggtcgagacgccccattgtggcgagctagccgttggcggctccccgggggccgtttctggcccgtcgtcgtcatcgtcggcgtcggccgctgctgccgtcctcgccggcccctcctcgccggcgccgctgctgccgcacgccgtctggccctcggacctcaccccaaacgccccctcgcccgtcagcgtctggtgcgacgcctgtcacggcccgatcggcacgctccggctcaagagtctcgagaaggacgattacgacttgtgtttggcgtgctttagcgcgcttgagcctgacgaggaggacgagcggagagaaaggaggttcagagcgatttggcacccagacgtgagggggcggcttgccggcccagcacggtcgaccgccgccaccgccaccgctgcccacgcccccactcggccggccgtcatccacccggcggcctgtgacgcctgctcggcccagattgtcggtctccggctaaagtgcctcgcctgccccgactacgacctctgcgcgcgatgcttcggcggcgggacggccgagggcggcgttcatgcttcttcgcatgctttcgtccgcatccagaattccgacgaggcgatcatccccgccggcagcagcagccgcagcggccgcaccgccggacggtggactctttcggtccccgcgctcgtcgtccggcacccgaacgtcatctgcgatgcctgccagcagccgatcgttggcccgcgcttcaaatgcctcgaggcggacgacccggcctgcgccgattttgacctgtgcgcagcctgcgaggccctgccggagggggcgggtgtgcatcgcccggggcatgcgatggtgaagatgaggcggccgttgggccaatttactcatgacgccgccatcgagggtcgagtcaagacacggagggacaatgacgcgcggcttgacgaggtcggcgaagaagaggaccagcccttcgtcgtagccgttggtgtcatggagaaggatcgaacaaaggcaggaggctgcccatgatacgctcggatctgggtcgaagcagatatcgaggccgagatgttggagcgccgggcacagcgctggcaggttgagcgacaagggttgaccgtcctcggtggaatcggaacccagcaacaggtgcaggcgctgcaggtttccgctgacggtgcggagtatggtctcaacgagcggcaagtctttgttggtaagaccgtccaagcggaggtcgttcaagctctcgagaggcgagagaggaaggtactccggccaaagaaagtacaggcgggcgtcgatcaggaggtgggtgacggtgctgaggtcgaagtgtgtgtcgatgcccgccgcgcgggacgaagactcatagggtagaatcgttggaccgacaaacgtgaggttcagtgcggttggccggcagaaggtcgagccattgagtgcggtccaggtgccttcactcggccagattgcgctgatgagatcggcagcgggcagtcgatgaacgagagataagagcgacttgcagaccacctcttgaaggctgctggcgtagtcggtgtcttcgtcctgcaagcggctcgacagctctggatggccgtagaagcgctggactgactgcgccagggcaagccccgctgcgtccagcgcgtcgcggaagcggccgattgcgacggggacgaactttaggacgacgttgcggttaagcagtggaatgacgatggactgaaagaaaggaagacagcgcatcagcacgcctggctttatcgaccgccacggaggacggaggacagggggtcgacgcacgagccacgtccggcagacgaccagcaggccgtgtaaaaaccctctggttgcggagcatcgcccaccgctcatcgaccgacggcccgtccaagatgggctcgagtgcggcaaggatcatctcgcgctggacgtcctcgggcagctgggcgagcgaggtgaggcgtggccggcgggagctgcaaacgggcggcgagacgcgtcggagcgacgtcagtcgagacggcctggctgtgtcgggcagcatctcggaggacgcacgacatggcaggctgagagctgagagcggtggtcgaggtgcgagatctgtaggttgacgagaagagggcaggtcggggtggcggtcgagagggaagagacgggctgtcgttcaagcgctcgacaggagcgtcggcggctgctgcgcgccgacggtccgacttgacgtcggtcgagccgtgcgttgggatctctcctctcgcgcggccggccggccattgccgcctcgccagacatgtcgtcgtttgcaaaggaggacgaggtcgcgatcgccaccatccggacgctcgtgcgtacctctttccttgctctctctcttgcgcgttgggggttgggaatgggagcgcgatgtcgagcttgcgtcgcgcgcagagggctgaggtcgccacgacgccttgggccggcggcaacggccggccggccgcgcgagaggagagatcccaacgcttcgcaagagggagcttcgacggctgaccctcactcgtcttcgccaggctgccgatgtcgtcgctaaggccaactcgggacaccctggtgcgtcgctgctgttcctttgttgctcgttgtgcttggtcgctatctcccctgcggccgttgccaacgaaggcgcggccgcgggccggacgagggcgctgccagcccacgaaaagcccgccgcccttgtgcgggccggccgggccgtcgtccgtccaaacccccaagctggccagtcgtgctgaccggcccgtctcctccgtccccccttcgctcgccgttttccgaaaaatgcaggtgctcccatgggcatgggtgcgacgtctcctctcctttcttgccctctctcgggccggctccgaggacgagctgggctgaccgtccctttctctctcgccatcaccttctgtgcagccgccgtcgcccacgttctttggtcgaagtacgttccttttctgtcgtccgcctgcttctgtctgttcgacactgacactctcgccattctttcctatttttctcaggttcctcaacgccaaccccaagaactcgaagtggttcaaccgggaccgctttgtcctctcgaacggccatgcgtccgtccctctagctgcctgacattctgacggcccggccagcgactgactagagcatccccaccctttttcccgcagttgtgccctccagtacatcatgctccacctcgccggctacgacgtgacgatggacgacctcaagtcgttccgccaactcggctcgcggacccccggccaccccgaggtccacgtcacggacggcatcgagctcacgaccggccctctcggccagggcatctcgaacgcggtcggccttgccatcgcccaggcccacctcgccgcgacgtacaacaagcccgagttcaacgtcgtcgacaactacacgtatgtcttcctcggcgacggctgcctccaggagggcgtcgcttccgaggcgtgctcgctcgccggccacctccagctcggcaacctgattgccatctacgatgtgcgttcgagcatgactttctcttctctttctcgaaacgaaggctgaacccccccccccctaccgccagcccgtcgtaaacgctcgtctttggcaggccaaagaacctcccaggctcgtcctcctcctcctcgcgaaagagaccgccgacatgctcgacgagcatccgcctgcggtccatcgcccgccggaccgtctccattagcagccgctgctgctcgcgctccttctcatcccgctccttctccttggctgagatcctgaccgacgtccccggagccgggcccgcgccgagcttccgcttctgctgcctcccgacgagcttcagccgcttcacccaggccgactcgatcacccggtcgagcccatcgaggcactgctggtactcggcaaacgcaagccgatccttggcgatcgagaggaggagcgacttgcgcgccgtgttgagcgcagtctgctggccgaggagcgattggcattggcggagcgaggtcgagatttcgtcgtcggcgcgttgagaccagtcgatctgcgggcgatgggtgggagcgaggcgggtcagcccaatggaggtcaagacgcgatgacggaggggaggtggggggacgtaccggctcgtcgccgaggaggccgacgagcatcagctccttcttcatgcgctcctcgagccggccgagactgccgtcgaccggccggtcgccgcagctgctgctgctgctgccggcggcggcggcactgactgtcggctcgcccgccgaggccgaagccgcaggcttctgctgctgcggctcttgcaagccgaccatcggtgcggatgccagtgttggcggcagcggcggcggcatgagggttccgagcctgaaccgatcgagcgcctcgcccttggcgtcgagcaagccgccaacgacccgctccgagacgggtccgagacctcgcacctcctcgacgagcccctcctccgcaaggctctcgagcgggtcaaacccaaagtcggccttgcgcaagcgcggatagtcgagactcgtattcggcgggccggcagcggccgaccccccgccgccggctgccggagcaggcggaggaggaggagggacgtatggcagcccgagagccgcgagccggtcctcctcggcaaactggtgcgtatagtgctggcctaagggcgggacgacgtacggctcgacgtcctcatccttgtagccctttaaaaacgccaggtcttcctcgccgacaggccgcgtgaacgcctcggcgtgcgcgaggaacgtcgcaaatagaagctgggtcgtcggcggtttgctgagtgtaaagtcgtcggagacttcggattgggtgagcgggagggacgggagcgggtcggcgatgggtggtctcggggggacgagcgagcgtgtcgcgagcgggagccggaagtcaatgtgtgcgccggaggttgccatcgagggcccgctcgagcgcgcgcgtgatgggctctgtaccgccgctggagccgacgccgaactggaagggcagcaactgggacggagctgagtagtgacgaacgagggccttggtaaccagccggtacaggagctcgccaaccgcgattggccggatgccgccgtcggccttgaggagcggcgtgagcctcgacgcgcaaaggagctgctggccaggagcgataccctgggcgacctgccgtgtgaggagcaggacgaaggccgagacgtcggcgttgcccagagcgtggccgaggagcggggccgtccaaccggaaacgccaggagccgtgtcgggcttgaacgagtcgaagcactgcctgatgaggtcgagcgaaggcaaagacgacggagccgcgcccgaccgagggccgaagggcgagaccggaccgacggggtgcttggaggcaagagcggcaatggtggcgggcgtgaggtcggcaacggacgagtcctcggcgagcaggcgagcggctcgactgagcttgccgtgctggacggcgatggcaatccgacgaggcagcgatgactccgacggccgagcgaccgaaggggacggccagtcgacggcaggaaacgcggcgagatgggctttgccggcggcaggcgagacggacgtcgcgagctcaagcgccggagctaggcctaccttgggcagcgcgaggaagtcgaacagccgagcctcggttggttcctcgatgtaggccttagcgagcgagccagcgacgagggcgaatggcttggaccacgcgagagggagcggcttgtggacggtgcggcaggctgcgagggtggcgaaccggtcgacgagaggtacagcaggctcgacctgaggggtgtgcgaggtcgaggggacgacaggtcgagcaccgccgaccgaggcacgacgacgagcagcggcgggccgaacgacgagcagcgagccgtccgagctgaccgagctcgtgggtgaggcaattactggaccgggcgagccgagcgacgacaccgggagagcacggggacttttggggttagggtgtaacgggcatgcaatgacaaaggcgggtctatggacgggaggcgaggagtttgagagttagacgaggggaggagacggaagcagaggaagggagcgcaacttagaaggcgaaaaagcgagcacgcgcccggagaagtgagagggagaggaggcgggagaagagaccgtacgacggcatgagggcgcgccagtggtcgaagagggggacagaggcgggggagagggtgccggcggtagagagaacgagagggaagaaaggggtggcggtgcgaccgaggtacttggaccgcttcgcagaagacggcatacgaggtctgcgcatgtctcgtgggctcgtccatcaccagaattggcggatcaagcagcagcgcgcgcgcgatggcaaccgcctgtcgctgaccgcccgacagttgcataccccgctcgccaacctgcaggttataaccgtccgggtgcaaacgggcgaaatcattcacgccggcgatatccgccacgcgcagcatcgcgtcgtcttctacataacgggcgccgcaaatcaggttgtcccgcagcgtgccgctgagcagctgaatatcctgcggcacatagccgatgtggtgacgcacatcggcgatatcgagctgacgggcgtccacgccgtcgatcagcaagttgccgctggtcggctgataaagattggcgatcagcttttccagcgaacttttaccggagccggtacggccgataatgccgattttttcgccgggtcggatcgacaggttgatatcaatcagggcgcgattcttctgttccggatagcggaaggtgacatcgcgaaactcgatactgccctgaatgctttcccgtttcagaggatagggctgttcgcctcgctcctgcggtaactccatcagatgccgggtttcctccagcgtcagccgcgcctgctgataacgggtaaacagctcggacagtggccccagcgtcatcagcgcccggctgttgagcaggtaacaggcgaacagcgtgcccagggttagctggctgttcagcagtagatatacccccgagataatcaccactatgccggcgagatgctgacatgattgcgtcatgtggacggcgatagccgataatgtttttacccgcgagtccagttggctgatgtcgccgctgatttgttcccactggcgctgacgttcgccttccgcattattaattttgatggcatccagcccgcccagcgtttcggtcagcagcgcctgccgttcgtcagtcagacgccgggaatgggtcagcgccgccattatcggcttttgcaacagcccgttgatcagcaggaccaaaggcaacgtcagcaacggtatccagactaacggccctcccagcataccgagcagaatcagcatcagcagcgtgaacggaaagtcgatcagcgttcccagcgtcagcgacgataacgtatcgcgcaatgcctgaaattcccctacccggtgcgccaccgcgccggtccgtgccggaaaggccgacagcatcatgccggtcagtcgttcaaacaaggtggcggagaggataagcgcggtctttttcccggcgatatcgacacaaatgctgcgtaatatccgcaggacaaggtcaaagagcagggcgataccaacgccggaggccagcacccatacccccttcccctcgcgcagaaagctcgcctcctcctctccgagcagcactatctcgagctcctcgaagccggccagtcgaaaaaggcgcttgccctcctccggacgagggtcgcgccgcttgctgctgctgcttcgttttctgcgagcagggagcgtgaggagggaggagagagggtgaggaggctagcgtcgtacgttcctccttccttgtgcacgtccaagccaggagcgggggcctgacggacggcctgttgtcggaaggtacatgctttacacggacccgacggacctgcacgctcgtgcttcctggcccggcccgacaccgaccgacccatcgccctcgcggacgcgcctcctcgcctcgctcgaatcgctcctcccgcccagcgcagtcctcccccctcaccggctccacacgctcctcacccaagcgctcgcatttcaacgttcggccgttccatacctcgtctcttgctcgtctgcgcgcgacgggggcctgatgagggatgtaagaggcgagagggggacgtttcctctccggccgggggggaggatggcgcaggacaacgagggggaggacggaggcgaagtgtggaacattgcgtggagtccggacgggcggagcttggccgcggtcggaacgagccggacgatctccgtctataggctcggattggtgcgttctttgtgggcttctctcccccttgctcaagacaaagagcgagactgaccttccctttccgcccccctgcccctgtcaggaacgcgccggcaagcacccgcaagcgaccctcgcctacgccatacccgacgcccacaaggacgccatctcgaccgtctgctggtcgccagatggggcgctgctcgtgacgacggccgaagaggagatccggctttgggaggtcgaggtgcgttcattgagtcttttacctttttcaccccttgcgaggcgtgctttggtgggagcgcgtttggctagcttgccctgcttgcctgcttaatcgcacagttgtgggcgctgactgcgatcgcactgtgggccgacaagctgacgccgctttcgccctccgccctccgctccttcagccctggaaggcaaaagcgactttaagcgagcactcggagctcgtctcgaccatccgctggctgccggacggacgcggcttcatgagctcgggcgaggacggcaagctctgccatttcgtgcgtcccccccccctggtcccccctcccttcccgtcgtctcgccgctgttgtgtctggctagggtgctgacatggaagtgggggcgcgaccgcataggatcgggatggtaagctcctctcggcccagcaggacatgactggcctccggcgggaggatgcgtcagtcgcgctaaagcatcacgggggccgcgggtgccgtcgcacgcccaccgcactcgatgagacgagtcgacttcgaggcacagagcggccgcgtccaggcagcaaataaccgggcagaaaaggacctaacgcacagagcaagatgaggagcaagaagctcctcctatcgcgcccgctcaggatgaccttactcagccaatccgtcggctccctctctcccccttccccttcccccttgtcctcatcggcggcgtcgacaggcggcttctcgaccgagccaaagatgcgcgggtttttgctgttggtccggacggcgtggagtcggcgctggggcgtgtgcttccctgcggccgaagacgaggcggacgaagaggagagcggcagaggcgcgagcgtgtcggctccgtcctctcctcctccgccgttggcgttgcgtcgataaagctgcccctcgcccgtgccgttcgacccatcagcagcagcagccttctcttccgccaacccaaactcgcccctccgctcgccggcgccggcgccacgctcaagcaggtccccctctgccatcaggctcggcaaacgctggcctgtaggcggcgctaagcccgaggggagcatcgactcctcgcgctttgtcttgaccgcagagagaggttgacgggcgtgaggaaaggaggaggggggcttaggcgggtaggagaaggccgacgagctggaggaggtcgaggaagaggacgaagtcgaggaggccattcacggtcgtgcaagctgcaagcgggcgggcggagggtcggttcgaagatggtttgtaagcacgggaggaaagccgctgcttctgctattgggagcgctagaggaccttgcaagcgggggggtttgaagcgggcgaggcgaggaaggacgacaacggcttcgaggacgcgctttcgacggagcgtcgtctcgtgcgctggcggtgactggcgacagacacgcgccgactccttgccttccctccagtcgaccgttccagagcaagtcgcgctctgatgctcgcatccatgacatcgttcgctccgtctcgtgccagcctgcccgctctcaaggcaagtctgctcaagaggcgagccaagggccggacggtcgatttacgtaatcacctgcctgctgcgcggcccaccgcgcgagatggcctcgtcctcctcgcttccgccgccgcctcctcttttgcttgacccctcaccttctcgcccgtccaggatggtcagttcctcatcaaacaacgccctctcttacaatttgctcacacgcgcctcttcccgccatccagtctttcgcagccaaagtgcgtccccgctcccttccgacgacgcaccggaccacgacgcgcctggggagccgtacgatggcgagctgctcgtcctagagcctgctgatgcgcaaggtgtcgcagagctgccgtcagtcgagtctgcggacgagacgacaggcaaggagaccgacgcacgacggccggagacgggtggcgtggttgacgctgcccgggtgctccctggagcctggggtgacgcccgtgcgggcgaaggggtgtctgcgggcactcagaggggccatccagttgtcatttcggaggatgagacggagagtgctgaggatagtgaggtcgagagcctggcggggtcggacgctgcgggagagggtgatggttgggcggaagggccgacgaggtcgaaacgccccgccaaaaccagccgacctgcaatccctcaaacgagtacgacttcagcctcgatacagacggctgacctcatcggccagacacgcccgccggcacgccggaacccagcacgagagcgcagattacctgcgaggctgatgcaaccgtgggccgcccactcggcgacgtcgttgcctgccctgccgttcccgtcgccgccacctccgcctccggagaccgaacctcggacctacgctgaggccataaggtcgccccaagcagagtgctggagggaggcgatggagaaggagatgcgggcgctaaaggaagcacggacctttgagctggccgatcgtccgccaggcgccaaggtcgtcgggtcgaagtgggtttacaaggtcaagcgcaacctagacgggtcagtcgacaagtacaaggcgaggcttgtggcccagggcttcacccagcagccttgggagtacggcgagacctacgcaccggtcgtcaagggcacgagcgagcgcgtcctgctcgccctctcggccgcctgggacctcgagctacacagcacggacgacacggctgccttcctgcacggtcagatggaagaggaggtctacatcgctcagccaaaggggtttgaggtgccaggccgagaagacgacgtcgcccgcctgacgggcaacctctacggcctgaagcaggcaggacgcacctggtggtcggcaatggacaagactctgcaggggttcgggttcaagcggtcagccttcgaccactcactctaccaccgaaacggggcggacgggctagcgctagtgggggtctatgtggacgatctcacgctcgccttctcgaacctcgccgccctgcagcgcttcaaagcccagctctcggcggtctacaagatgacggacctcggcgagctcacgcacatgatcggcttgaaggtcgagcgagaccgggcccggcggcggatcgaggtcggccaggagcacaaggcggaggagggagggaagtggggggggagaggcggacggacccgagtgcgagccgacgccagcgagccatttgactagcgcgagcaggccgagcgagagcgcgagcgtcgaccggcccgaccggcccgtctcgagcgagtgggcaatgagccggccgagcgggctgctcttacttgccgcagcttcgagcgggctcggctgcgagcggctggtgatgccggacgattgtcgggcgcgcgaggagagccggctggcgtaggacggagggtgggagtaggaggaggtcgtcgagcggtgagagcggccggcgagcgagagagccgagcggtccgacctgagcggcgcgagcgggcatgcgtacgtttggcagagaggaagaggagaggtcagctctcgtcgaggacggccagggcgagctagacgaaggaacgcctgcctggcgcgacaaaggacagacatcacgctcgaagtcgatgggcgccggaccctcagccgcggagcaggagcaggagcaggagcagcaggagccggccggtcggctcgatcggacttgagggcggccatcgtagcaggcggcgagatgatcaggctcggtcgtcggtcggcgggaggggggcaagaagggacgcacgcgtcgggttctcggcgcagcaagcaagcaagcagcatggcctggccggtccctcttccctgcctcccctcttgccacccctaaagcaaggaggtcgagagcaagcgggatagcagtactcgatccggccctgacggtcctgaccgaggtctctgaactgtggcttttcggaccatctcatgccagctctcgactacctccaagcctgctaatggcggcggcccggccgaccagagcagccgacgacgggccctgccgaccgaccgaccgtgccaagctgggcctggggtcgcccgctctccaatatgcgcgtcgcaagagggcgcatccatccatccatgggctctggcctggcctggctttccgagggaagttcgacattgctcgcgaagtggaggcctttgtcgtttggctgcctctctcctccgtcgtttgctccggctattgcaagaccggtcgctcttgccctccctccttaccaccaccatctccaactccattccaccctcaccaacaacaaatgtcgctcgcccctcctcccaaggccatcctcgaggccggcaagccctttgccgtccatgctgaactcacctttaaggctggcaaagtcaccgacgaggtcctcgacgacctaaagcagctcgagcgcgactcgagcgcggtgcgtcccctcccccccccctcccttcttcctcacccagcgtccgacgagacgccccagccccttcatgcccccacgccgcccacgtcgtccactcgtctgaaacgtcgcggacgccgaccttggagcggagcacgaaccgctttaggtgggtcaggaggggctgggcggtcgacgggagcgagagggccgaggggtggtcgatcaggtaggagcgggaggccaaatggggatagatgaaggtgtcgtggaggagtcgaccctgcgtcgagagcgagacgagcgaggaccggaggggtcagccgatgggcgacgtcaggtcgagcacacacctctctcttgaaagagcagcaacaggaagggctcgaacctacctgggcatgcaagaatgccgcataaaacgccctgctctcttccgtcaaatccgggatcctgacggccgcgagcccgttaaggaagcgctgagcgtcggagcccgacacgcggaggaccgaccgagccgggacgggcgcgcaggacgggaaggcaacgtctcggggggtaaaggacctttgcgggccaccagagggcgaggcaaacgagcggcgtgtgaagatgagtctgcgtgaggtgctgcttgccgagcaacaagaggacgacgaggcgagcatgctagatggagatggttagaggagaccgaccttctctccctcctgacgaccaccaacgaatccactatggcatccagcagcagcaccgtcaagtcgaccgccgaccgccgcaaagtcggccacaagggtccggaccccctcttcgacccttctctccctcggtattgttggctgaccctgcgctcacgccgaccaaccagctccgccgtcgaccgccctcaaagcctacctcgtcctctacaacgccctctcgtgcctcgcctggtcgacgatcctcctcctcctcgtcgcacacgtctttgacctctcgcacggcggccgggcggtggccgagcccgatgcggctggcgtcaagggtctagaggcgatcggtgtcaaagtccgcgagctgctccttcagctccagacgctactcgctcgagtccttccgggtgtgcacgagcccgctgtcgcctcgcaagcgtcaagcttcctcagaagcacgctccatcgcgctcgcacatcgtacgccgtactcggcccgctcgtcaagctcgtccagactgcagcggttctcgaagtcgtgcatgcggcattgggctgggtgcgctcgccggtcgggacgacggcgatgcaggtcgccagccggctttggtccgtctgggccgtcgctgagcagtttgctgctgtccgtcctccacgctccctccctccctccctccttctttcttttcactcttcagaccgccgtcgctgacatgccgtttgtccgcgctctgtcctttcgaaggagcagcaccactgacagcccacccccctcctttcctcccgcttggccgccgccggcacagaccgcagcaccggcttcgaagcgaaatccttccagaaccagaatgcaaagaagcggcgcgagctcgagggctacaagtatgggacggaggacatgtaacacacacacatcatgtttctttttgctacgcttgccgtttgtggggcaaatcgcggtcagtcggttcgtgcatgggacgacgcggttgtcgcaaggggtgcgccggagcggaaggggaatgtagcgggtgtgatgcgctctctctctccgtctgaagcagtcgtgcgagattgctcggctgagcgcgacctcatacgtcccacgcggccagccagaaatcggccttccgaactctcagagtcaggtgagggaccccgcactctttgccccgcgcgcgacgcgtcgtgcagaaaagagagagagagagagagagagagcgacgcgatgagcaggtcggtggtgcctctctctctcgttgtgcaagcgctcattcggaggtgcaggccgagcggagtgcatgcactcttcctcgcacggtctgacttgctgctgggtcttgcgggctgaaggtcccgtcgtcgttgtggctgtcaccttccgctgtgcatctgcacgcgcgaacctcttggcggtcggcccttgcgcagggagcccttttcgtccccaactctcgtcaacacccaccaccttctctcctctccttcgcttcccttccctctttctcttccttcaccatgccctccgtcgccgccacccttgcctttggcctcccgctcatcgcccggtctgtcgtcggccaggtcactgccggtccgttcctctcaccctcgccttcccttcctctctccaccctttcgattcccacgccgctgctccgatcttgcgagtgggccggccacctgttaatggagcacagtgggagagagggggagggcctcgccttgctggcttgagctctcgcagcacgcctcgggcgtcgtcttgagggaggcccgggacgtctgcacgcccctctcggctcgctgtgttgtgatgctcgcgccacccgcctgcctgtccgccgagcctctcttggcttcgaaggttgtcactcgcttttgctctcatcgactgacagactttgctttccactccctccttcctcccatccctccagtcttccccaacggtgtcaccaacccgccgtccgtctctctcccatttacgcctccgccccccacgcgcgcaccaaggggccgtgccaaaagcagcggcgccgcagcaaaacgataaaccaaaaggaaagacgcaccctcctcgggcaggcgctcctcaagtcgcgcggcctccctccccaccggccgccgctcgccctcgcgctcgaccacctctcggtccgcggcgagggcggctcgggcgtgtcgttcgcgccgaccgtcggctcgaccttcgccccttggtccggcgcgcaggacaagcggcgggtgcggaagctcgagcaggccaaggggctcgacgaggctgagaagggcgagggcgagaagcgggagaagaaggcgggcgaggagaacctcaagaagggcgagaagtctgtcgactgctttctcaactctcgaaccaaaacccgacgctgaccccttcccctttcgccaggttcctcatccatgacatttcgctcgtcctccagccgtccgagatgttgctcgtcgtcgggcggcccggctcgggctgcacgacactcctcaagtcaatcgcaggcctccgctcgggctatgccggcgttgacggcgaggtcctctacggctcgatgaaggcgagcgaacccaagaaactcaggccgtacaaggcggccgtctgcttcaactcggaggacgacatccacgtgcgtccctcgctcgacgctctgcgacccccgctctcggctgacacttcctgctctgctgcccccccgcccctcgccagttccccaacctctcggtccgcaacacgctcgactttgcctttgcgcagaggacgctctcgcccgcaacccgcccgcctgtctcgcacgacgacgacacgccgctcggcgagaaggagtacaacgcccaggccaaggcccggctgctcaaggtcttcgggctcgagcacaccgaggacactcccgtcggcgacgagtacgtccggggcgtctcgggtggcgagaagaagcgcgtctcgatcgccgaggtcctcgccaaccgggcatcgatccaggcctgggacaacgccacccgcggtctcgacgccaacacggcactcgccttcaccaaggccctccggacgtacgccgaccttgagcggctgacggccgtcgtctcgctctaccaggccggcaacggcatctacgaccagtttacgaaggtcttggttttggccgagggccaggtcatcttctacggccggcgcgaggccgctaaggcttactttgaggagatgggctttgacgcggtcgagggcgccaacgtcgctgactacctgacgggcacgaccgtcccaaaggagcgccaggtccgcgacggcttcgagggcaagatccccccgacgatcgacgactttgccaagcgctaccgcgagtcggacgtcgcaaaggagatgcgcaaggagctcgacgaccacctcgccaacatggctgaggtcgagcgccagacgcgacgacgctcccgcctctcccttcctttccgcccgccggcggaggagggcgagaagagggaggaggggagcgggaaggagggcgtgtatgggccggaggcgattgagcgtgctgagccggcgggcggaaaggaagggagaggcgggagcgtcgtcgtctgcgtcgtcgtcgcctgcgtcgtcaagccaaaccaaaatgcacaaaacgtcagtacgcgcgcgcgtcgcaaccctctccttctgccagccaaaacgaaatgagcagacgtacctcccccactgtccctactgtccgcacgccctcgcccgtcgcgcgccggacgtggataggctgggcggcgagccttgccgagactgatcccggaggcggccggccggggccggcgatgctgctgttggacccatccgtgccgacaccgccgctgacgtttccgcctccgacgcctgcgctgctgctgctgcttgagccaatgccaccgaccccgcccgtaccgacatcgccggcgctccctccgttcccgctgctgccggcgaccgactggagcgtcggcgtatcaggcgacaacgagcggaggagctctccgtccgcctcggcttcttcgtctggcggttcatccttgacctttggcgccgttccaagaccgacgacagtcgacgttcctcctgccgttgccgtcgcccctgccgatggcccgctaccgcttgcaggactcgacccgccgccgtcttcttcgtcaggtatcgtcgggctcgcccgagcgaggccggacgagacggtccgggccgagcggcgcttagacgcgtgccctcctcctcctcctgcgccgggaagaggggacagcaccgacaacgccgacgcttgccggtgatctctgtcctcgttgtcgtcgtcgcctaactcttccccctccgccttcctcttcccgagcttaaaaggcgacgacgtgccctctgtcgaaccgacggccgccatggccggccggaacgtcgggaagtacgagtctgcgtggtgcggttcttggcctgtgcccgggacgtacgatagttgctgctgctgctgctgctgctggggctgttgctgcgggtgctgcagcagcgggtggtgaagcgctggaggagccatcggcagatcgtgtcgcttgttgctgctgctgctgccatcggcggcacccgggggcgagcggggtgccacttgctgctgctgctgctgctggagatggtgcgggaagtacgacccgctgctcggccctgctccggcgggctcggttgactgtgagtacggcccagggtgttgagatgggtagccgctggacggaggggggtagggctcgtagggaagttgctgagcccatccccccgggcccgttagccctttcaccgtctcgctcgctgctttctgttcaagctgacggtctctctcttcctctctccctccttgtgtgtgcgcgcagcttcacgccgaccgagctctcggcccggcccgacctgatcccccagctcgtgcccgagcacgccgaggccgacctccgcgcgcgcgggatcgacatcgacagctttgtgccgacgccgctgcgcgacctccggatcagcgtcgactaaaccgcgcgcgcccttccttaccccctcgccatatttgtcgctcgcccccgtgttcaccatcgcacttgtcatccccaccgtcaatcacgccttcactccgcttgctcgccgtcgcgacgcaatccccccccccctcgggcggctcacgtcagtcattctcggctctgtcggtcgggcccctccttcctttcttctcttccctgccctcgcaagctgcacgtcctccttcctcccaccaactctcaaccctctgctgtctcattcgcgtccgcccgtgctctatcggaaagctccttttcaactgtgcaaggtgtggtcgggccatagagagagaagaggggtcgttgcatagggcgtgaaggggaggactcgaggagcggccgacagaaggggaggggtgtgacagggccaccgctcagccgtcgtcggcctcctcgtcgctgttgagccgcatccgaacgacgcggacgacggcctctgcgtcgatcgggatggcgtcgccttggaagccgtccgggtaggccgtcggcggcgtgtcgggcgaggtcatgacgctagagggcggggcagagtgtcggtcgggcggcgagagaggacggagagggaggatcgtcgtcagcaaagggacgtctcggacgacgacggcgagcgaggctcgtatgacggccgtacacaccggtcgtcccagaagccatagtggccgatgccgagcgcccttgcggtgaactcgtagtcggccgcccagccgcccggggtgaagaattcgaggacggtcgactttggcgtcgggtccatccagaggaggtgcgttaggcctagcgggcgccgtgcataggagagagaggcatgtcagttgtcattcgaagggaaagggggcagggggcagggggccgcaccatttccatggacgcccatcagcacgtcgctcctccccgcgagcaccacctgctcgtcgagcgcgagcgtctccatgtcagcaacgacgagctcccagccgtcctcctctgccgcgcgcttgagggcggcaacgagcgcggcgtgggctgaggggagaagcttgcggcggttccagttctggcgggagacttggggggctcggtcgttcgtctatgctcggaaccgctcggtcgtcaacggtcgcgttcctctggaggcctggacggggcagaaggcgagcgtcagcttcctgcgggtctggggttgcctcgcctgggtccacgtaccggcggctgaccggccgagttccctctcgccgaaggctatccgcggcatcttcgtcggctatggcggagatgagggcggcgcggtctcgtcctggtgcgtgtgggtgccttcccaaggcagggtcgtgcggtcggccacggtcgcgttcgatgagggccggttctggtcaacggtcgacagaaagggcggcgacgccctaacctgggacgacctgaacaaggatgccaacaagctcgacgtcagccaggcacggagggcgagcgggacgagagaggatgacgcaccagacgacgagagcccgtgcgggcattacgacggcgtcccaaaggtgggcgcacaaggagatggggccgacgagcagaacggccaggacaccccgtatcgagctgccgagccaggaagagacgagtcagctcctgtggttgtgcaagagggaccggaacctgtgctggcgccggccggagacgtaccagggcctccatcgtcggtcgggtccgtcgaacaggttgaggtcgaggtcgcagccacgaccggcctctgctcctgcccgatgccctccaagcagatgcctccttccggccgccgagtccgggaggcgagggagacgatgttggactccggaggtcgccacccccccccccccggaaacgaccgagttgaccctccggaggcctccggcgaggtcctttccgaggatgagatagtcgcaaataaatggccgtcgggcgacgctgagggccggtcggaggtcactggcactgcaagtgggatacctgtcgaaggccagagaggtcaggtcgtcgtcgcacggcgcaacccaacacggtcgcggcagaggcccgcacggtatcggacggaccaggcaagccttctcgcggtcgacgacgcagtcgacaaaggaggagagaggttgaaggtcgtcgacaggcggttggagggtggggtgggtgagtgtcggcggggaaccgtcagcggccatcctgcaggcccttttcgttgggaccgaacacgcacagccggtcagcttcgacggcccatgcgtagcagctttcgtcatggccctcgcagcatcccaccaagcaggcgtaccggaaagactgaccgaggcgctgaccggcccgaacggccccgcctggagggcaggagccgagctcgagatggcgtcgctgcacaagcacaaggtctggctggacgctggtgcccaggccggaccgaatcggtccccatcgcttgacgcgcttctgcctcagcccaagccgctcctcgacctttttttcctgatcaacgaggtcctcttcggccgaccagtcgtacaacacatcctcgtcgtcaccgggctcgtcaaacgacagggtcgaggaggcctcgctttcggaacgggcgtagaacggccgagtgcgcgaactggcgaggtcgtcggtggacgaagcgccgtccgagtcgtagcctgcgaaggaggaggaggagggcccaccgtacgtctcttggacggcctcgcgcggatagccataagggtgctgctgctggacgcggctgcccggccgctcgctagccccggccgagtcgaccgaccggaccgacggcgccggcgccgccgccccctgccgccgctcgtgagcgaacgcagcgtcggctcgagagctagcggggaaggagccgtcggtaggcgacgggccggcctcccagagctgggccgtctgctcgcgctcagttgccggccgccgccacctccgatcgtcaggcgcaagccgaccatccccctcgactccggcgtcgtcccacccgccgccgccaccttcgccgttcgcaaccgaataaaacgccctaccaccaccgccgccggcggcagcagcagcagcagcgctgccgccgcccgcgccggcagcagaatggagtgagccctccgacccggcctggcggagcacgcggaccgtcgacgagaagccgacggcggctgccttttgtcgctttgctttgcccaccgccggcgcgggcacgggcgcgggtgcggggggcggtgagagctcgacgtgctcgaacggtggcggggcgacgggagtggaggtggtagtggtcatgaaggtagggagggaggtggagtcgacgtcgttggacgtcggcgagcggtagtcggacgtctccatctgctggacccaggccgagcggtcgtcgtcgtctgcggcgtcttggaccgtcgcgggccgccctccgcggggaggaggagggtgagcgatcggctgcttgtcgtcggaagaagcggagggaggggggcaaacggcccgctcctggcgatcccggtcggcagtagcagcagcagcagcccgccggaccgacggcgagctcgacgaaaactcgggcggcggacgggggggcgtccgagtgccggcgacccttcggcggccggcggcggtctcaagatcggagtccgagtcgctgtgacccctgttgttgagggcggaagagggagaggactgaggggcgacggtcgggggtgcaggaactgctggccagggggcgagcgctggtggctggccggtggtgggagggggaagaggcctggcgggggctggaggtgaggcgcagggcaggggaatcagtcacgacttctctccgaaggctaggagcgaggatctcaggcgcctcgctgctcgtctctcggaggagatgacaacaaaattgccttcgaatgaggcgacaaggacgcacagccggtagcgagccggtcgtcaggagcttctcgaccgtcgcctgggcggagcgcgtcctgctcaggtcatagacgactgactcgcgcgggacgtccggaaaggccgacgtgaccgactcgaccttccgtacgcatcacagtttgtcagctttctcattcgatgagctcaggggcagagggaaggagaaggggacggaccatcgactcgctgacgtgtcggaacgcgccctggccgagcacaggcggaccgggccgaccgccgtcgacgcccgccgtcgttgccgtcgactctggcttgcctgatcagcgtgatgtacggaagctatcagcactggaccaagggggggggaggcgatggagagctgacctttgaagagccaggcgtaggcaagccagagcaggccaaccgcgacgagctgcacaaaggcgggcttcagcaatccgagctcggcgttgtcagacagtctgaatggaggagggaacacacgatctggacagtgtcttccatctgaaggtgttgtcaggaaggagggttgacggagggcaagtgtgtgatggctgtcatcggtcggtcggagggacgaagcgctcgcgcgagcatcatcgcgagctcggccgaccggcgcagcagcataccgcgcacgcctagtcgagccgttgccccgagcggcctgcccattcccatctggagcagtctctcaagaagtactagcacatgcacgataaggagagtgagacgaggggagtgaaggaggaccgagggggggcatatctgctcatgctcggctcagaggttgaatggacgaccgtgaggatggacaagggtcgaccgggtccagaagcgaccgacaggggaaggaagagcactgagactgcacgccgagcgcggcccgctgtccgtctagagtaggacgcgcctcactatgcccctccgtatccttctcatcctccgggcagcgaggcggcagtgagccttctacccccttcaagcgagcgagcctacgtgggccgaagggtgtaaagcattccgctctagtaaccacggccgcgaccactgaagaggtaagatctcgcgggtcagtctcctgattattacagtcaaaagtcaaaagaaacggggtgaacgcaccggtacccgcccctccctctcggctgctggaagccgtacccctgctgggatcggcgctgcggctgacccgctctgcatttgccctccccccgttaccccgcagatcttcgaccggctgagcgagctccgggcaaagctcgagcggctccagctgacgcaccgctggacgcttcgcgagaccgacctctacaagtccgtccccatccccccttccctccctcacccttcctcacacgcccgcgcgggactctcgctgaccggtacgcgcgccttcgcgactcacgaaaagctactcgatggcgcttcaggagatcgactcgatgcgcgtcgacggaaagtttgtcgacgccgacggcgaagttccgcccgagggccagtttgtgcgtccccccctcgacgcgctttccctttacgtcgtctttgcacccgctgacggcacgcgatcaccctcgaccgggagcagggtctgctctacctcctccggcgctgccacggcctcatctacaagctcatctcgtcgtcggagcccatctctgaagagctcatgccgatcgccaacaagctctcgaccatcaaaaagtgcctgaacgaggtgctcaagtatggcgggcccttttcggccagagacctctatccgtatcatctcgcgctcaaccagattgacgggctcaggaaggacggcaagttttatagccaggacgggagcgatagtatcccagagggccaggcgattctcgttgcccatctgagcgagtgccacgagctgctcgagatgtgcgtcgtcgccccctcgcgcgcgggcgctccttaccctttacccggtgcagatcgcaagagctgacgctccttcttccttttctctcaaccccaggctgaaggcaggcatggacgagagcgacagcgactagggcccgacgacggcctctcggcccaccgcgctcggtcggtcccggccttggctttgatcggaccggatgagagacggtcagtggtgttggaaggaggttgttgggccgctgggacagggtgtgatgcacgcctggtcccatgcgcttggagtcgcttgcccgacttcgggcggaccgtcgtcgtcgtcgttctcggatccagtgaaggctttcgcctctggcctgcctgcaggaacgtttgctcgttcgctcgctcgcttcgacattccgttaggccgacgggcggcggactctctcctcctcacgcgcgcgcatacacgcttgggcgcgacagccggccaactctcggcgctctaatcacacgcctccgtgctgcctcctcttgccccccaactctcactactcttcccccctttctgccccatctcgcccgccgctctctcaggggcgcatgtaccacgagaggcgccagagcgtgtcggggaaggtctcgccgggcgggaggagggaggtggtggaccagggtccggagggggaggagcgcgtgtggatgaggacggtgcgatcctgaggggcgggacggagagaggaggggagtcagcacgtgagtcgatggtcggatgccgacctagcagagcccgagcgaggcaaggaaggaggagaggacgggcaggaagggcaaggatgacgatgaggggaagggaagccgggatagaagggcaaggaagcaaggggaggggcaaccgacctgcgagcacgaagcaatgtacgacgccggcaagcccgtgttgggcgcccaagcaacgtcgcgcacccagtcggtgtggcgctcaatcgtctcctcgaccgcccactctttcgtctcttccctgttggcgcgcggggggaagcagcgagaggcgtaagtcagcgacctcgctagctcgcgagcgcagtcggcggatggggacaggacgaggacgcacctccacccccagatcttgacctttgaatcgcacccgcccgtgacgaccctccgctgcctctcgacctgcccgacgattccccccggctcgcccgcgcgctgctgctgctgggtagggttgtgggaggagagcgaggagcgcgtgagggagcccgggaggacagagggcgcccacgagatagaggttgcgcccatcgggtgggcgggggcgacaaaggcgtcggtcgagccgtcgtctgaagggcgggacgagcgcgcgtgagcagagggggaggtcagtcgcttgcgcctcctggcaaactcaggcttgcgagactgagcaacgccggggacccactgttaaaggtgacgaccgagattttcgagtcggacgaggcgcacgcgaggatcgggccgagctcaaagggcgcccaggcaatcgagttcactgtatgtccgggtggccgggtggaggtgaaagaggaagggtcagatgggggttgctgttgcggctgcgcagtcggctgaatgcttcggcgtgagacgtgccggccagagcgacaagagtgggaacctaccgctcgcgccgtgtatgctcagctccttgatcacctcccaccgctcgccatccttcgcgccggcccccgttgtcgttgtcggcggcgcgccatacgtccctgctccgcccttcccgcccgcggcagccgccttgctgctcggcgcgccgagcgccgctcgccccttctccttccaaatgaggaccttgccgtcgtaggaggcggaggcgaggatggggccgaacgaggggtgggcccaggagagctgccagacctctcccctgtactaaccccccccccgcttttcaagcgccgacctcaacaacctcgccgcccgtgatctctcatccatcaccggctcggcctgcctcgctcaaacagccgacgtccgacgtccagccgagctcgcacgcgccgtcgaagcgaccgtcaagtcgtttggcggaatcgatttcgtcatctgcggttcgtcctcctgtccgcctttggcccccttttgcgcgttgtttgtgacacccgtcggctgactggtcccgcgtcttaaccctgatatctctatcgccctactcgtccgctccaggcgcggccggcaacttcctcgctccgatcgagggcctctcggcaaacgccttcaagacggtgatcgacattgacctcgtcagtcttttaggccttcccttgcaatggacgcatctgttgggtgtgatcgctcgaagcatgatgggggcgggagaggtagagcgtaaatgggttgactggaagactgaattcttctggcgctcgtttttgcccccttgttgtttccccgatcctcgctgtccgactgcatgcacgcaccctcaatccgccgcgtacgcaacacaccatgtcctccccttactcacgccctcgacccccccgactttcgcagatgggcacatttaatacgatcaaagcgaccctggccgaggtcaagaagcggcgcggcgcctacatctcgatctctgcgacgctccattaccagggtgcgctcctctccgctccgctccgctccctccctcctttgtccctctcaaacaccctcctcgcttctcctcttcctttctcgtcggcccccctcaccctggctaaccgctcttctgttccgttcgcctgttcgtttgtggtgggtgtgggtataaaaggcgtgccctaccaagcccacgtgtcggccgcaaaggccgcggtcgacgccctctcccaagtgctcgccgtcgaactcggcccgttcggcgtccggtcaaacatcgtcgcgcctggtctgtcccatcccccttcttcacctcaccttgagacggcgatactgaccttctcgcacgttaggtccgatcgccggtacggaaggtatgggccggctctcgcaaggcaagccgtttgatcaagccgagattccactcgggaagcaaggcgagccggccgatatcgccgggatgtgtgcctttttgttttcgcgcgaaggggagtgggtgacgggacaggtgtttgtacgtccccccccccctctcctctacaaactcgtctttgatgttcttctgacggcttaaagctgactgcttccccctagcctggggggtgaagagtgggagggggaggggtgcggtgacgagttggcgagcggccgagggcggacggaagaggcggtgcgcaggaacggcgtgagaggccgggcgaaggacggcgggtaggccgcgaaagggtcgtcgtcgtcgtcctcgtcgccgctgaggctgtttctgcggccgccgccgtcgtcggacgcacgctcgaagccaccgcctccggttgccggctggtcgtcttcgtcgtcgttccgatcgctgtcgtcctcgtccccttcctcgctgctgtcgtcgtcgccctcgtcctcactcgacgacacctcgatcggcctcccacttgatccctcaacctctcctccccatcgtcgtcgttgtcgttgacgaacgagcgcgtcaaacagcgcgcccagggtcggcttgacgtcctcgtcctcgttggcggcggcggcggtagggtcgtcgtcatcgtcgtcgtcatcattctcgctggcgttggcgtccgaacatccccggtcccggccaatcctcccccttacagagcgcacgacgtcgacgccgacgccgacggcgctgtcagctgtcgcggttgctgacgcgagcgcgagcggccgaggtcgggcacgctggagctccatctgccgtcgaagcgtgtctttgaggggtgtaaagccggtcgtcggggtaggtttgacggcgggcctgacagcgagggcgccggtcgaagacgagagtgaggagggccgggatgcagcgggcgaggagttgagcgcaaggtttgagagccggtccgagagcgctttccgggtcggcgaggacgcggctgttggatttggatggatgtgctgtccttgtgttttctcgtaagcgctgaattcgtagccgaagccttcgccgtcgtcgtcgtcgccgtcgtcaaagcgcttgcccatcatcttcgtcgtcgtcgtcgtcgttggtggtcgtgcgcggcccatccgcaaactcgggagagaaacaacgtagcgcgccaccgtcgtcttggcaggcgccgacgctggctgcgcggcgggacgtgggatcgagcgggcgatgtaacgcggcgtttgagggggcttcgctgggtgctcttcctgctggtgctgctgctcatggtgccgatgcgagtggtgcgtctgcatctcggcgcgctgcgcgtgtgctgcctggcgaaagcgagccgggggtcggtccgtctctgccctgctgagcttaaggggtcgggtgggcgtgatgagcgaggaggcgtacgtcggcggcggcgaaggaggggagcgaggaaggggaagggggcgcaggcatcttgccgagctcatacgttgacggtctcggtctgccagaggcctctgcgctctcgtcgctcgagtcgccgtcgtccaggcggcctcctccctttgaacgcagcgcgacgtgcctgtcttcccgtcgtcacccggttggcccgcccgcctgcctgcctcgacgatcgcctcgaccctctccgcctctcctggcggccgctcgtcgcacgcagatgccgatccctcgctcgcccaccctccagccttggcctgctctgctcatctcgtctgacaggatcgacacggcgcccgagatggagagggcaaggaggctggcagggaccggccaaccgggtgcccttcctcctgttgccgccggcatcccaaccccctcccgacctggcccgaacccaggagactggctggcctctttctcagtcgacgtcgacggtctattgacgagtccttgcgcgcactcgacggcgtcaacaacaacacgacgggcggcgaccgaggctgacgggtttccgcctggcctgcgcgcagtcgaagcggccttccttgcaaccgccgacggaccctgccagagtctacttgcgctttgcgcttggctcggccgccggtcccaggcgtctggtccgggtggcgctgactaggtgccaatcgctgacgatcggctgaggtgcgtcggtcggacctggccctctcgcgcgcagcagctcccgtgaccgtctttctgaccgactggcctcgtttgctgtagttagtttgtccgcggacgccggtccaaggtctcgtcaaagctctcagaggcggcgtcggacgactcgctccggacgctgtgcgacaaggaatgcgtccctttcgttcgcttacgcgggctgcccggaacctgttgggagctctctggctgaccacgccatctgcctggccagcgtcttcccttccctcgcagccttcgtgagctgccaacgaagcctatcaaggtcgtctttggcctggcgccgccgccggcgatcatctcgctcgagctcgcctaagcgatgcaggccgccccgccggtcaagaacctcgccggcttcaagtttgactttgacgtcgccgtcgacgaggtcgtcgagagcggcacgacgacgccatcggtcgagtcgccgttgctgtccaagtggctgagcgtcatcattcaggcggacgaggccgaggtcgagtcgttgacgccgcctccgtcgcctccccggtctgtcgcggtacgtcctgcctgttcgctctcgctctcccctggtcttggcctacctgcctgtctggcgatgggcgggaggtgggacgggtgcgggcgcagcaactgatgcgacgggcgctcgagaggccggtgcgggcgcaggtggcggcgaggccaccggtccatcgtccggctcgtagtccatccctccgttgccgtcgtcgtagtcaacgtccatccggtcgtcgtcgttggcggtggcggccttagcgtcctgttgcgcctggcgcgagagctcggcgaccatatcctggtctacgtcgcggtagtctggcccgccttcgctcggcctgaccgagccctgctgctccacccggtcgccatgcccctgaccttcttcccgctcgtccaactcctccggctcgtcgtcgccccacctcgccgccggattacgcacctgccgcccgctccggaggctcttcttgagcggctcgccgtcttggaacgggtcaaacagcccctgctgccagagcatgtcgagcccagacatgtatccctttgaagggaccggcgggtcgacgactgtgccaggctcggcgtagcctttccacccgggccgggctttcggcttcggtaaggcggagggcttgggcggcgaaggaggccggagcgcaggggccgacttggctttgctgccggtgctgctcgatggcccgctggcgtgcttcgacttgaggccgttccggcctgtgggcgtgctgctgctggctgtcgaggacggcttcctgctcgccgccgacttggccggccgggcagacgacgacgagtccgccgccgatgttgctcctccgcttgccttcgagctcgcccgcccgccgctggccttcttgaccggcgagtactcgtcctcgccctccttctcctcctccgaatcgtccgctacgacgctttgataccttccgccagccgcagagcgcgacgctgaggccgagccaggcaccgcggggagcttgacgcggtggtgtgctggctgagggggagggagccggcgaacggccgttggcgctacagacgacaacgaggcgaccgacgacggcgtccgacctttcgaactcgagccagcaacgccggcagtcgcacggggtgtcgacgctgccgacttggcgagcgctcccggcttagactttgctctgctgttggccgccttgagagccggcggtgctgcaggcggaggcggcggcgagaaggcgtcgagcgggtcgtcgtcctcgtccgcgggcggcagtgccggtggtcgtggcggaggcgactccatgacgaggacatcgctgtccgagtcagagggaatgtcgacccgcttcggcatggtcggcgggaaggctcctcaacttacccggcgaccccaaaccgccccttccttccatccttttcaggcctcgataagactggcacttcgtccgggcgcagtctggccaagccgacccgcgcgacatctctacctcgaccccgatcgacgtcccgcccccgcctgtcgcctgtcgccttctgagggagagggagtggcgccgtcgcctcattttatgagctctcttcttttccttagtggagtggagtgagcagaatggcgtgcttgcttgtctggggagaaaggcattggatgagtttgtctgatcgagtgggcgtgagagagcactcggtcgtggcgagggcgggcgcgcgcagggcgggcggcgtgtctcctctcccttccctccgaccatctgcctcctctcctcccttctctcctcgcctaagctttcaatgatcctctccgtcttaatcttcaacacgaccggcgtcccgcgcctctcgaagttctacactccgaccccgcccgcgactcaacggagcctgatcgccgccatcttcggcttggtcgctgagaggccggctgggggcgccgtctgctcgtttctggacgcgccggagctgagggagggtttcggagaggatgcgagggtcgtctacaggtaagaagcgggcggtcctttcttgtcccttgggagctgctgcttcgcctgctcaagagaagagcagcgacgacgacgggcgggaggagctgctgctctctcctgaagcacgcacgacccctcgaccctgaccatcttcctgtccccatcccttccgttcaggcaattcgcaacactcaccttcgtcttcaccgtcagcccctccgagtctgagctcggcatcctcgacctcatccaggtctttgtcgaagcgctcgaccgatcgttcgccaacgtctgcgagctcgacctcgtctttggctttgacgaggtcaactttacgctcggcgagattgtccaggccggcttggtgctcgaaacgaatatagcggtcattgccgcgaacggtgcgttttgctgcttctgcttgcttgctgctgctctctcttggtgctgccggagtgccggaggggaggagttgcggcttcgccttcacgcccgcccaaccggctcacgacctgacctcccccccccctttcctcgtcccaacctgcagtgaccgccaagtcactcgcccggcgcaaatccctccagtccacctctctccttccctcctctctcgacccctctgcctcctctggtgcggccggccgggcgcgcgtgggtgggctgccggggaccgcggaggcaggcggccgataggaggagggctcgctcgtcgcctgctttcgacttgtgctcgctgtcgagcggctcagctcgctcgccaggctcgacactgggtttggggtcgaggcaggtgcgctaaggattgccgaatcggtggaccttagggagctggactgggccctcaagccagcttccggaagggagagctcaaggctgacctccaacttctcccgcccctcgtcagatcccgacgacgcagacgatcctcgccaatcccagctcgtcgtcgtccggcgccggcggctcgagctcgctcgccgtccccctgacgtcgcttctctcgtcctcgctctcccggacgacctcgacgacgccctcgtcagccgccaacccgacgccgccccggacgctcgacatcgactcgatgatctcgcgcctgctagagtcagcctacactggcaaggtccctcgctctcctccgctgaaaaacgccgagatctcctcaatctgcctcgccgcgcgcgaggtcttcctctcgcagccgacgctgattgagctgagcccgcccgtcaagattgtcggcgacgtccatggccagtttggagacctcatccggatgtttgagatgtgtggctttccgccggcggccaactttctcttcctcggcgactatgtggaccgcgggaaacagtcgctcgagacaattcttctggtccgtcccatcccctgggcgtagcatcccccccccactacctttgctttcgctgacgtctccctcctcccccatcggcagcttctctgctacaagatcaagtatcccgagaatttcttcctcctccgcggtaaccacgaggccgccaacgtcacgcgtgtctacggcttctacgacgagtgcaagcgccggtgcaacatcaagatctggaagggctttagtgcgatcccacccttcctctcgctccttgtcgaccccgggtttcgagagactgacccactcctttgcgtccgccgctgccgctgcagtcgacgtcttcaacacgctcccgatcgcctcgatcgtcgccagcaaaatcttctgcgtccacggcggcctctcgcccagtctctcgtcgatggacgacatcaggcggattcagcgcccgaccgacgtccctgactatgggctcctcaacgacctgctctggagtgacccgagcgacacggcgttcaactgggaggacaacgagcgcggcgtgtcgtactgctttggaaagagcgtcgtgcgttgtcccccccggtcccttctcgcctctctctccttaccgaccggccagtgtcgagctctcaaaagagagagaggggaagaaaacgcaaagagacggacgcactccgcatcaacgtcctaaccgctccgatcaggttgacgactttggttttgacgctcggccctcctccggccggtgctgatgggtcagaggtgtttgaggcgtaggcgtcgtagctccctcccgaggggccagacgaagtgagggtcgaggtggaccatccgactggcgcaggcggccgagcaaaagaggaaggtgacgggcaagagggagggtgtgtgtcaaccctcttggcagcaggagcagtagaggaagagaagccacggactgcgagcgaggaagcggtcctcattcaggacggcaatggcgttgataaagaggagcgaggcccaaaggagatcgctagatgaagatgaagatgacgtcagccagtcgtcatcagggagggagaaagaagggaagacagacccgacgccgaggcccatcttctgcgagttggctgaatgacggtcggaagggggggagagggagagatgcctggctgcttgctacccgttagtcagcctccgacaagtcggaagcaaatccacgcctccacgccgccgccgccctccctctcgctaacccatcactcaccgcattcaaccctctctttcccacccgcatacaaggatgacatcgatcggaacgggctacgacctgagcgcatcgacttactcgcctgatggacgcatcttccaggtccgtcctcgtgcccgtcatgctgcttctgctactgctgctgctgctgctgggctcgaagggcctgtgcgatggtcaggccagccgactcttgtctgtcctgcctggcttcgccagaggagagagcgagcagcagcttgaggctctggctcagggctgtcgaccgaccgaccccttgtcgtccgacactccgcccgcggccggccgttatacagcaagctgacgagactccgccccatcaacctccctcgtccgagcaggtcgagtacgccggcaagtgtgtcgactctggcgggtctgtcctctctcctctctctctccctctctctctctctctgcaagggtcttgaactgacgggctcgctcgctcgtttcccgtgttcggtatccgctgctgctcgctcgcccgaccctctgcttgctgctgctgcccttcccgtccacccgtcctccctccctcctcttgcttgtcgctcgcctgcgcctgtctcttatacagctctgaagctgccgacgatcttacgcgtgtagatctcggagcgggaggggcggccacttaccttcgagcagtacctcgtcagtttgcacccactacagacaagcagttcgtcaacgatcgccttgcccgttgcggcggcgccactcgatcgaagctcggcgagcgcgagcaggcagccgtcgcacgtcgtcggcaggcatgaggtcgacagggcgtgtgcaagcggcgcgagcgagaggatgacgtcgcctgccgtcatgcgcaagcatgtgtgtggaccaaataaaagggcgtcagccatgcggctctatggctgaggagtgagaagtagagtgtgtggacggaccgggcttgaacaccggcttcctgctcaacgatgacgacgacgccgacgacgacagaggaccctcgtcggccgaggaggcgacgaagacgccccgcccttggctggccgtcgtccgtagctcgagccgcgggccgaggtcggggtaaagcgaggttgtggtggtgatggtggttgggccaggctcgggcgcggtgagaggcgccggttgaacgggtggcggcgggggcgaggctggcgtgtcatctagcggctgctgttgctgtggtgtttgtgctgctggctggccgacatgggccagagtcgccctcgcaaggcgagacgagcgctgagccgacaaggcggcaaacgacgatgccatggttgcaaggcaagccagcaggcggccaaaggggctctttctcgcgccggccgacaagcgtgggaacccttgccccgcgggccgaatttcgtctcgtctcgcgcaggcaggcaggctcgctcgacctcctgcacctgcacctcctctcacccttcttccctacaacctatactcctcaccccaacccaacccaacccagagccatgcccaagtcgaagcgcgagaaggtcgtcgccctcaccaagacggccaagaagacgcgggacgacaagtcaaacctgattgaggctgtcagtctcctgttccggaggtggttgcgcgcgggcgagcggcgggcggcgcgcagagctgcacccttctctctttgccctcagcaagctcgattaacagctgtcactcctgctgctgggatgggaggatggccgcttgcagtcgctcgtttgcttggagggacactttgctgatgccctctcgcccatgtgtcactcccgcctgcccgcccgcagatcaaagagtcggcttcgaaatggacgtacctctggctctttagcgtcggcgacatgcgcaacgcgcacctcaaagaggtccgctcgcagtggcgcgggtccgtcctcccaaccccctcttactcgccaaagggaaagagcacagccagcacacgattggcgtcgagtttgcgagccggacagtccggctcgcaaactcgacgccaatcgtgtgctggctgtgctctttccctttggcgagtaagagggggttgggatgtcagcctgggtgggacgggttgagtgtcgtccgatcaggagaagggtggatggggccccctagctgggctggctgaggccgggcgagggagccgagagggaggagcaacaacgccaagctggtcagaggacgagccggcgcttgctcctccattccagcgcgtcaacctccgcccagccgacacccagcacctcaacatcctggaccaatccccagctgaaacgaaaggaagcaaggcatgggcggggtacggacaggtcgagtgcaagaagtggtgaaggagacacgacttgcccgtcccgctctcgccgatgacgacgagcttgagcaggtagtctttcaaatgcatgtcagccgtcatctgggagggagaatgaggaaagaagacggaccgtaagcctcgacgagctcggtctggtcgtggtcggccatcggggtgggttgatgagggtgaagagggaggcgatgggcaaggcgaaggttgaggggcgcagcagcagcagcagcagcggcgagggtcgacgaccttcgtgcccgtcctggctcccttcttattgtagctagagcagacggcggtagtacgggcagcatgcgcatacatccctcctgccctcgctctcggccgacatgctggatgaccggaggaggaggagcaagaggcgagcggctctccctctgacccccaatctggactccgccaagccccaaacgggccactccctccccccggctcggcctcctccttcagccagtcagagatctccttccctcccctcgtcctcctcgtccttgtcctcgtcctcaccctcccctctcaaagcagcagcaaggatgccctcgacgaccgcctcagccgggccgacgaccgcttcgggccaggctgtccttcggatcccgaccgatttcccgctcatcgtccgtccattgcgagcaagcgagcgagcctacgagcgagagtgagcgaggagctgactgcgtcgactctctctctgtctctcttgactctcctgccctgcttgccctgcctcgccctttgcccgctcgctcgctcgcacacgacctctgatgaaccccgctcggcgcgctaccttcgctgtctccctgcgcccgcttcccgcccttttttttttcaagcagaagacggcatacgagatctgcgcatgtctcgtgggctcgtcggcttccggtaaggtaacgttcagttccagcacggaaatgtcgtcgcctttttgctccaactgtactgtcaccatttccgggtcaatctgcacgtatttgcagatgacttccagaatgtcgcgtttcagctgcggcaggtaatgtggttcgttgtccccacggcgtcgctccgcgacaataatctgtagccgttccttggcgatattggctgtcgtttttttgcgggacaaaaagaaatcgagtaacgccatgatttaccccccaaagagtcgtttcaggaagcttttcttctcttcctcgataaaacggtaaggccgttcttctcccaacagacgatccacggtgtcctcataggctttgcccgcatcggcgtctttgtccaggattaccggttcgccctgattggatgcacgcagtaccgactgatcttctgggatcacgccgaccagcgggatgcgcagaatttccagcacgtcctccatgctcagcatgtcgccgcggttgacgcggcccggattgtaacgggtgagcagcaaatgctccttgatcggctcctggctctgttcggcgcggcgtgacttggaggacagaatccccaggatacggtcggagtcgcgtactgacgacacttccgggttggtggtgatgatggcttcatccgcgaagtaaagcgccatcagcgcaccggtttcaataccggcgggggagtcgcagataatgaaatcgaacgccatgtcggccagatcattgagcaccttgtccacgccttcgcgggtcagggcttctttatcacgggtctgcgacgccggcaggatatacagattttcggtacgcttatcttttatcagcgcctgattcagggtggcgtcgttctggatgacattcacaaagtcatacacgacccgacgctcacatcccatgatcaggtcgaggttacgcagaccgatgtcaaagtcgatgacaaccgtcttcttacctttttgggctaaaccggtagcaatggccgcgcttgaagtggtcttgccaacgccccctttacctgaagtaacaacaatgatgcgtgccataaataattcctttcaagggcctagtctagaggttgtatggtcagaacatggtcgggcggactgagtttcaggcgcgccgccttcccgaaatagttttccggtatctgttcgctgagccagtaacgcccggcgatagacaccaactggggggaagtgtcaggtgggaattgagaggggaaggagaggggaggataaggaggacgcgctcatgagtccttggtagaagcctcgttcgcggaggctgatgaggtctaacgtagcgtgtgcggccgtcagccagcagcgtgcgaagcggagagagcgagagagcgaggggaggaaggtgggacgcacccgtcgtcactagcgagctcagacagaggatccccgccccgccgaggccggcgacggcccggccggccaggaagacggccatcgagggcgcgaaggaagagagggcgttgcctgctgcgaagaggccgccggcgagcgagaggcaagccgtgcgcgagaggtggtgcccccgcgcttcattcgaggaggaggaggaagacgacgccgccgccgagggcccggcaagggcgccaaagagcggcgtcgcgaggaccgaggcaaagctaaagagcgagccagtgtagggccccagctcgacgcggtcgaacgaggcgctgatggccggggcgagggtcgagctggcggcgagcgagagggcgaaggagaggttcgacagccagacggcgaggctttggtggcggcagtgggttagcggagcgagtgaagaaagcaaggaggaatggaaggcagtacggacagggtccatcggatgcgcgtcttggacagcttgcggccggcggacacgagaggcgtctgctcagacgacatgctgatcgaaggtgcgaggcgagcgagagcgtgtgcagccccgcccgaacgaaagagaccggccagcgccgatggctctacgtcagccgatggctttgtcagcacgcgccgccggggccgaacgacgaccggcagcggcacacagcccgccctcatctcgctcgcctctctcccctcaccctcctgatgccagcctctgtcctcggtcagtcccctcgccctcctccctccctctttcaacaagcagctgacgtcatacacaccctgattatgaagccgccttcatctgtgctttcgaggacctccacgggccgacgctcctggcctcctccctctcggccgaagcggaggccggcctgctcgaggggatccaagtcgccggttcgtccctctccctcctcctcctctttccttctcgcgccgagctgacacagcgggattggatagcgctgccgagtggactgcatgcggtcgaagaggacgacttgtccgtccctccccttccttctccgggcaagacggagagccgacaggctgacccgcctccccccgggacaggcggggaagcagggcggggctgctcgtcgacgtcctcccagtcgccgtcgtcgttgtcgtcgcttgcgcctgatgcaccgtcttgctcttcgccgtcggcgtcgtcctcgcctcccgcatcaacgccagcccaacgaccacccgccgccgccgccgtcctggactgctcaccggccgcagggtcgagctcgtcggccgactctggcgctatgcggtcagtatcagcgtcagagggtgttgagaaggccatctggcccggccagcgcgaagggcctgcctcaggcgagggtccgtcgtcgtcgtcaccgatggccgcgacagcgggggcgatgacaaccgaggggttcgtcgttggagaagcgtgagcgagagcaggcgcaggacccaagctggaggaggaggaagcggaggggagggaggagaaagtggttgggaaagaggaggggagcggtgcgagggctgtcgacggtgacgacgcggccgaggcgggaggcgagagcgagggcgatgcaagtgcgcgagcaatagatgggtctggcgagggcgggagcgggacggccgagggagagctgggccgggcgagaggagcgccaccggcggcgtcggcctcagcttcgagccaatcgcgccaaacgtcggcacccgacgtcgtcccgccctcctccatcgccgccgcccatctcagccgcatctcgaagtaacgcacgcgcgccaaccggaccttctcgggcgtcgggcgagggtttcgccggccgagggcgggctgttcggggtcgtcgttggcgtcgtcgtcgtcatcgtcgaaggcggaggcagcgtcgtcgagcctcggacgtttgaatgcgatctgtccgcttcgaccgatcggttcgccgtcgtcgtcgaccgccgccgccgccgccccttcagccgctgcttcatcagccgctgcagctctcgccgtcgcctccgccagcacgcgctccgccctccgcctcagctcgaccgcgcggacgcctgctgctcgttcggctgctccatcacgcaccaccaccacctctgctgccggcggttcagccgcagcagcagcagcaccgaccggcgccagcggtggcagggcgtccgcgccgacccgcgcgttcgccgcccactccctgagcaggaaccccgcgaggagcgagagcacaacgagagcgatgagctgctggccagggtagaggtcgcgggaggcgagcagggagagaaggtcagggatagaggggcggggagggccatgacggccgacgactggaagcggaggtcggtcttgaagtcctgggcgatctcgcggacgagccgctggaagggcagcttgcggatcaggagctcggtcgacttctggtagcgccggatctcgcggagggcgaccgttcccgggcggtaacggtggggcttcttgacaccgccggtaggaggcgccgtcttgcgcgcagccttggtggcgagctgcttgcggggggctgccgagcgggaagatgaggccgtcagcgacggcgagcgacagcaaggacgacagccgagcaagctaggacgcaccctttcctccggtcgacttgcgggcggtctgcttggtacgggccatggttgcgactggcgggtaggtgtagagggtgaggggtagaggtttggctggctgtaggtggtggttggtcgggaaggaggaaggcgggcgagctggcgggctttagagggaggttgacgagggcgcgggatgcgggcgggtcagagcgacaagcgacgcgactggctttcgcggcgcgggcgcgaccgacggagcgacctgcgacgaccttttcactgatcttgccaggaccgctgcctcgaacagggtcgctgaagggtgcgctcggacgagcaaaaatcgccctcttttctcattcaggtcgctcctcctgatgtgctggtcgccccgagatcggtcgtcctgccacgacgcccttctttcctctctgacggccggagctcgaacctccctccgcgcggcgcgcctggctgtctggctgggctgacgcgcctcccgccccgttcgcccttctttagagcagccagaccagcttgccttcttctctcccatcaaccaccaccaaccacccaacacctaccctcaaccccacccccactactctctcttaaacaatgtctggccgcggaaagggaggaaagggactcggcaagggcggagccaagcggcaccgcaaggtgcgtcttctcatcctgctccgtggccgtcgacctcagttgctgatcgtgacctcgtctcgtctcgctcgtcccgccagatcctgcgcgacaacatccagggcatcaccaagcctgcgatccgccgtctggcacgccgtggcggtgtcaagcgtatctctggcctcatttacgaggagacccgcggcgtcctcaagatcttcctcgagagtgcgtcgaccttcctcccttgctcgtcgccctgtcgcttgcacatgctgaccttgcgcctcctgcctcctccgatcaccctccgtatcctctcgcggcccgacgtcgagcacctccccaagatctaccagaacctcggactcgactatgacgagcgggtcctcccctcgatcgccaacgagatcctcaaggcgatcgtcgctcagcataatgcggcagagctgatcgaggagcgcgagctcgtccgttcccttcccctcccttccctttcccccttgcactcgcgcgcgcgagctgacactatgtgtgtgtgtgtgtgtgtcgttgtgatgtcggaccaaccaggtctcggcccgaatccgccaagagctcctcaagcgggctaaagagttcaacatccggctcgaggacgtctcgatcgtcaacctgacgtttggccaggagtttacgcgcgcggtcgagcagaagcagattgctcagcaggatgccgaaagggcaaagtacattgtcgagatggtacgtgctcccgattcactcgctttgctcgaggcccgtttcgctcgggcgcgatcgacgtgagattgcgtcggcgattggcagggcaagagctgatcccgaccttcccctccccccccctcttccctctgcgcgcttacacgtccctccgtctcttcctccgtccgtccgtccgtccgcccgcacctcaggccgagcacgagcgccaagccaatgttatccgtgccgaaggtgaagccgaagccgccacaacgatcggcaaggcgcttgaccgggcgggcgaggcgtttgtcgcgctgaggaagatcgagacggcccgtgaggtggcaacgacgttgagccaggggaggaacgtgacgtacctcccgagtgggagtgcgggcggaggcggtggggggatgctgctgaacgtcaacgcccagtgaggaaggagagcaactagcgagatgtagcaccccctcgaccgtgtactatgacccctcaccgatctctctctgccagcggcgccctgtcgcccggcccccccgagttaatcaacgaagagtgcggtcaggcatgtgttaatcgttaaaacagaaaaacagaaaaactcgtaaacaacccccccccccgacttccgcagcagccctcacataaactcggccaagtcgtcgacgacctcaacgaccggctcgggcgtcttctccctctcctcgaccagcccaagaatctcctcgccatccctgacgctccccctccgcttccgtttcttcccgccgacggtgctggacgtagcggcctgggcgccctcggtcgtcccgcgccccccatgtctcgtccgtgctcgaccagctgtcgctcgacgacttcctcgactcgcagcagcgcgccttcgaggccttctcggcctcgcgggccgccgtcagcagcacctcttcgcccgccgccgtccagacgccgctccggatctcgctcgccctcaaacaccacacgacgctcttcatgccggctgctctagccgacctgccgccgacgtgcaagatcgtctctgtccctggcccttctgcgtcggctgaggttgcagcccgcggcctgccggggacgaccgttgtcctcgacgcagactcgggcgaggtcgtcgggctcgtcaatgcgagcgagctcaccggcgtccgaacggctgctgggagtgcgatcgcgagcagggcgattctcggcaaaggcgagggccggtcgaaggtcgtcgtctttggctcgggcgtccaggcgttctggcagtgtgtcctggcggtcgtccctcatcccttctcatcctcgtcagctgagccgtctgcgccctctttctcgcagcgcccatctgcacctcctgctcttcccgtcgcttaagcatctcgccctgatcgcccggccgtcgcacatgacgctcaacgagcggacaaagtcactgatcgaccagctgcgcagcctccacccgagcgtcgagatcgtgcactcgtgcgtcgagggcttcgaccgcggtcaggccgtccacaatgccgatctcatcctctgctggtgcgttcgcttgcagcttccttacttgcagatggtcggctgacggcgtcttcactccgcagcacgccgtcgaccgagccgctcttcccggcgactcagcctcggcgagggacgcacatctcgctcatcggctcgtacaagccgcacatgcgcgaggtcgcgcccgagctgctctctacccgaaccggcggcgtcgtttacgttgacggcgcggacgagtgccgggccgaggcgggcgagctggaggggttcgagggcaagctcgtcgaaattggctcgcttgggggggcaggtgtcgtcgagcgtcaggaggacgccgacctgacggtctggaagtcggtgtgtcgaggccagcgctggcgagtatcgacgatgggcgtgcgacggctgagaccttgctttcccctcacgcttgctcgcaggtcggcctcggcgtccaggacgttgccatcacggacctcgtctttcggaagggcaaggagctcggtctcggccaggtcgtcgcgctctgagatggcaacgccttggaagcgaagctacatggcgaagatgtttctctggatgcactaaaacgtatcctacgcccgtggttaagaatgaaagagccgccagataccgttgtattgggttgcacccatttccctctactacaagaagaactgttacaagtgctgccagagggaacccggctggtggattctggcgcagcgattgctcgccgaacggcctggttgttagaacatgaagccccggatgcaaaatctgccgatgcgaatattgccttttgtatggcaatgacgccaggagctgaacaattattgcccgttttacagcgttacggcttcgaaacgctcgaaaaactggcagttttaggctgatttggttgaatgttgcgcggtcagaaaattattttaaatttcctcttgtcaggccggaataactccctataatgcgccaccactgacacggaacaacggcaaacacgccgccgggtcagcggggttctcctgagaactccggcagagaaagcaaaaataaatgcttgactctgtagcgggaaggcgtattatgcacaccccgcgccgctgagaaaaagcgaagcggcactgctctttaacaatttatcagacaatctgtgtgggcactcgaagatacggattcttaacgtcgcaagacgaaaaatgaataccaagtctcaagagtgaacacgtaattcattacgaagtttaattctttgagcgtcaaacttttaaattgaagagtttgatcatggctcagattgaacgctggcggcaggcctaacacatgcaagtcgaacggtaacaggaagaagcttgcttctttgctgacgagtggcggacgggtgagtaatgtctgggaaactgcctgatggagggggataactactggaaacggtagctaataccgcataacgtcgcaagaccaaagagggggaccttcgggcctcttgccatcggatgtgcccagatgggattagctagtaggtggggtaacggctcacctaggcgacgatccctagctggtctgagaggatgaccagccacactggaactgagacacggtccagactcctacgggaggcagcagtggggaatattggacaatgggggcaaccctgatccagcaatgccgcgtgtgtgaagaaggcctgagggtcgtaaagcactttcagtggggaggagggatgataggttaagagctaattaactggacgttacccacagaagaagcaccggctaactccgtgccagcagccaccctctgcgtcatgccgtcccgccgctgctgctgctgcctcgctggccttcaagaagggcggcggccgttcctcatctcgccttccctcccgaccatcacctgctttcctccacctacccaaacaacccacccagcatccaccctcatcccaagcatcagcatgtctctccgcgacctccgtgccctctcgcgcctgatggacgccacggccagcccggcctcgttctttggcggctcgaccctctggcagccacctcaggctctctttgacggtccgttaccgctcgattcaagtcgtgtcgcatcctctttcgccctgactgaccctcgctcctttcctccccgcgccgcccgcccggcgccagaccagacactcaccgcctcgttcccctcggtctcgatcgaggaggccggcgacggctacgtccgtgcgtctgctctcgccatctccgccctggcctgccatcgcgcactaactttgccttccctccttccttcccttccgcagtcaccgccgacgtgccctcgtaccgcaagggcgacgtcaaggtccacctcgccgaccagaaccggcggctcatcatcgagggccagacggcctcgcgcgaccgcttcggcccggccgacgagggcaccgacggcgccggcaagcagcagcagcagcagcagcagcagcagcagaaggctggcggcggcggcgacgaagcctcggcgtcgactgcgatgaccaagggcgacaagcaggccggccagggtacgtcctcctccctgcgtacgctctctcgccgtgcctgctgcctgctgaccgcgcatacactcctccggccgctgcctagtcgctcgtgtcggccagggccagctgctcgtcaacgagcgccagacgtttgcccacttccggcggtcgttccactttgcccagccgctcgacccaaagtcgatcaaggccaagctcgagcacggccagctctgcgtctgcgtcaacaagcaggtgcgcctctcgtccgaccctcgcggggcgtctcgttgctgacccgatcttctcgctctttgcccacccgccgctgctgcagaaggaggacgagggcgtcacctcggtcgacgtcgagtgaggctccgctcggccgtcgctcgctctcgtcaccgtcgctggctagccttcgaccgggcctgacggtcgcatcctgctcgtgcgcgcttctggtccaccgactccgtccctgtctgcgattccatgcccttcggtcgcagctcaaggagggggggggggctgtcgccgtactcgctcagtcgtcattgagatcggctgcacttacaccgttgtgataagtcaagacggctttgtaccaagcatgcagggcggctcttgactgctgctccgactggtctaagtttgccggcagaggcccggcagctcgttcggatccgacgcagcgcgcagccaggtgaccgcgtcttcgaggtgagcacggccccatcggcgttcacagctggcttatattctgctgaagtgatcctgcccctgatgcgacagtgttcgtgccggtacgccaggctgactgctgactgcttcgcaatcgcaatcacgtcccgcccaacttcgccccggccgacacacgctcggcatcgcctgcacttcgcctcgagctcgtctccttctcgagagtgccgcttactgcaatcctttcagtcagcggcgcagcggcagacctttcgctcaggcgacatcctcgagctaatggtccgcgtcgcttgtgtcgagaaaggtcgccgaggtcaccaagaggatctgcaattggagacgagtttgtcagactgttccctgctcggcggtcaacgacgactactgcgactgcgacggcgctcggacgagcaaggtccgtcttgtttttcctcccttctgttcgctgctcgctgagtattcacgtgctaacagatacggcactttggcgattcaggcacgtcggcaaagggcactttccactgcgccaactgcaactaggggctcggccccgcctgggtcatctcgagccgcgtcaacgacggctcctgcggtgcgtctctcacttcgttcgccctgtccgcgcgggttcaatctgagcgatgtctggacgctggctgacctcgaagttttgtcttcgctgcgctagacccagagtgctgtcagagacaagtatccaggtctggaaggctggcctcggtcaacatggcttgaacgaggctatactattgctcctgacgctcactcttttgttggctcaccgtagaatcacgtctgagctcgatcaggaacgacgggcgtgtgcagaacatagtcgacgtggcgggaagtctgctgtcgaacttttcgtctatctggcgaacctctggccttgcttactcgtccttttggtgcgcacctgtcttgagtcagcggaggtaggcttccctcgagtgcgcgggcgttcaaatccccccccccccttgggcggcgacccctctccctccttcctgtacccctccccgcgcctcgtagtacaacaagtacaagacgcacttcatccagacgcaggtccctgacggcacctcgtcgaccgtctaccgctgcggccccctcatcgacttctgcgccggcccgcacatcaccaatacgtccaagatcaaggccttctcagtcacgaaagcctcgtcgtcctacttcatgggcgacgccaaaaacgactcgctccagcggatctacggcatctcgttcccggacgccaaacagctggccgactacaagcactggctcgaggaggctgagaagcgtaaccaccgcaagatcggccgcgagcaggagctcttcacattccacgacctctcgcccggctcgcccatcttccttccgaacggcatgaagatttacaacgcgctgatggagctcatccgggaagagtatcacgagcgcaactaccaggagggtgcggccggcgtcccgatccgatcgagtcgagagcccgagagctgacacctttcgctgcccgccagtcatgtcgccgacgatgttcaacgtcgacctctggaagcagtctggccactatgccaactacaaggacgacatgttcacgctcaacgtcgacaaggacgagtttgcgctcaagccgatgaattgcccgggccactgcctcatctttgactcgcgcacgcggtcgatcaaggagcttccgctgcgcatggccgagtttggcgtcctccaccgaaacgagagcagcggctcgctcagcggcctcacccgcgtccggcgcttcgttcaggacgactcgcatatcttttgcacgcccgaccaggtgcgagcgcgcttccgtgtctgcgccctcaaggcggcctcgctgactcgccccggcttgcgcgtcttcgctagatcggcggcgagatggagaacctgtttgagttcatcgacaaggtctacactggctttggcctgacgaccaagttccggctgtcgacgcgcaacccggaaaagtacatgggcgagctcgccgtctgggacaaggctgagggcatcctggccgagcagctcgacaagtatcagaagggcaagtgggtcctcaacccggaggatgcggctgtgcgttgaccccccccttttgctctttgctctcattccccttgccggcgctgaacacccccgctttgtgtgcccgccccccccagtttcacgcccccaacatcgacatttccctctcatactcggtcaagcggccgtcgagtacgcacgatttggcgcccggccttcgcgcgcagcaagcccgcccttggccctcccctttcatcggtcgcccgctctccttactctcccgcgaccactaccgactactctccctctcgaccagcccagcatgcgccgctcagctcgcttctcgaccggctctggccagccagctgcgacggctgcggcgaacgatcagctagcgagcaacagcagcggccgccgaggtgcgtccctgtctcttctttcagcagcccgctcgagctcgtctccttttcgcccgcttcctgagcctgatcctcttgcctctctgcttccatctacaggctcgaaggtccagccaggtggtcaacagacggcctcgacttcgacagccagcgacaagggcgcgaagcgcaaggcagcggccgtgcccgcgggagcaggaggtccgtgcttccatcgcggccgccttcgcttcggcccttcctcgtctgcgacgacctaaaggctgaccctccagtctactgctcgcagtcccggcgtcaggtaggacgcgcgccgccgggaagaaagtcaagacggaggaggacgcgtcagacgaggacgagacggcggtgccagtcaagaggggtgcgcccaagcagctcttgccctctccctcccgccttagtgactgacttacttctcgactcacttcagctttcaaagcttgcaagcgcctctcgacagctggcagaagcagcagcagtaagacgcctgcctcagcgaagggaaagggcaagccgagggcgccggcgccggctccagctccagtcgagtcggcggatgaggcttcgtcgtcggacgaaaaagaggaggacgaggagacgcggccggccaagaagccgcgcaagctggctaagggcaaggtgcgtcggtcgctctaatgactgctgaggagcgaggtctcgtcctgacacgacttccttgccgctccctcgccagttcgccgactggcgcgagttcccgtcgcgcctgacgtttgaccggctgccgcttgagctctgggacatgatcgtctcggtcgattcgccgctcaacgtgcgtcctcaggctcttcctctcttctactgacgcgctgacctcgtcgcttgtatccgccgctgtcgcagctccgagaccacctcgcgctggccgggacaaaccgctacctgcgctcgtgctacaccggcctcgtctggcaggtaagcgaaacggcccgattgcccgagaatcgatgagcggcgggggaaagagggaggagggtggctttctcttcgacctcttcggtgagagtagtgtcgccgccgtcgtcgtcgacgtcggcagcggcggcagagaggtaagggttggaagaccgttcgccgagctcgatatcgtgctcgaagctgcccgccagcgactcaaaagcaggaggaggaggaggaagtggagcgacaggcgtcgtcgacagcccgcggttgcgcgacgaaggaggagccgaggtcgacattggcgagtgacgctaacgttcttgacgcggcgagttgaaagagaggcgaaggaagtgctttgaagaagtgagcgtcgtcgagctgaagtcgggtagtgcagggtcggaagggagcgtcgttgaaagatgcggctgagatcgatactccaggctggccggcagctcgagcgtgaggtcggtgatggttggaggtgagcgagcgctggctgatcagctcttcccttttcgacttccctcgctggctcgcttcgtcatcagcggccgagcgaaggacggtcgagtggtcgaaggaagggtcgaggggtcgagtgcgcgagcgaaaggtcacgggccgcgcagcagcccgtcaaggacggcccggtcatcgacccttccgcccagcaggactcctgaaggtcgcgaaagagatggcgagcgacgatctgtgagagtctgtgacagggcgctcgtcgccaactacggccaggtcggtcagtcgggttggagaacagcatacgatcccctttttacccccccccctctctcgctttcagactccgccgagatgagcgtcgcgtcgcgtcctgctggtctcgtcgtcgccaccaccgaccgccacaactccgaccgctcaaccctccatcctccttctttccttagcatgtccctctttcgctcaaccctcgctgctcttcccaaggccactcgcgttcgcccttttacgcgttctcgatcgcccaccctctcgctgacgccctaagcctcccctttgaccgaccgaccgcccggcaggcattctcgacaatggccgagatgcgcgtgattggccggctcgtcaagacggagaacaagccttacaggttggtccttgctctcgcttgtttgctgtgtcggggcagctgcagaggtggggaggaggaggagcagcgggcgggcgggcagtcgccatcctgcgtggttgctcttctcgagccctttccttcccccccccccccgggcgcaaacagtgtcgatcttcgcccttggctcggccctcggcgggccgctcgcgggcttgctcgctagcagcagcgccgcaggaggtgcaggagcgggctggcgcctcgcgctcgtcgtcccttcgctgcctgtcctgggcgtcgggctcgcaggcgtcgcgtggctcctgcccgggacctcctcctcctcctcttcctcaccggccgtctccatccctgctgcgtcaaccccgccagccgccgtcgcgagcaagccgaaatcgcgcactgctggatcgctccgctcgtcgctcgccggcctcgctcggacggtcgacctcgccgggctcggcctgctcgctctcgccgtcggcgcgctcctctgggccctgagcgtcaaggcctcgcctgtccacccggcctttcgacagcgtgagcggttggtcgcgctcgcgcttgcgcgggagacgtcgttctcttccgcccgctttgcctccaccaccctcaccgccggcctcgtctcctcctctgccgccgccgccaggatcaaagtctccctggcctggtccgacccgcccgtcctccttccactcctcttctccctcctgtccttcctcagcctcatcgccgtcgaacgccggctcgaacgcaagagcccgggagcgggagggaggtcgggcgcgctgatcccgctcggggtggtcatgcagcgaaacgtcttctgggtccgtcctctcccctctccctccacctgcttcctctccgcctatagctaaccccctcccccttccctgcgggcagacctccatctcctccttcctcctctgcatcgcaaacggctcatcagcattcaacctccccctcttctacacgtttgtcgcggccctcccaccgacgtccgtcgggctccggctcctccctcaggcgctaacactcggcgtcggctcgctcggcgcgggggtgctgatccgccggacgggcgggtacaggacgttggggctcgtgagcctcgtcttgccaatcgggagcgcatgggccatgtcacgctggccgacgcccgccgagcgggccgccgccggcggaggaggaggggggtggcatgaatggctcgacccggcgccggcgggcttggggtactctgcgttcctggtgagctcgctgctggcgatcctcgcttcgggtgcgtcgctccccttcccctcttgaccgcttcggtgccctagctggctgacggcccttccccccccccttcccaccgtcccttccccccccccccctacctcgactccttcatccttcccttcttcccgacaacctctttcctgacgctcgccccacccaactttcgcagacgctaccctcctcaagccaaagccggcggcctcctccaagccgtcgtcggcctcttcgcagccgctcaacctggtctcgaagggtcagtccctcgctcttctccttcctttgtttctcgcgcgctctcgccgctctcagtcttgccggtcgcctttcgttccttatgggggcttttggaaagggctcgggcgggcggtgtgcgctggacatcttgcttgcccctcgcgcgtaggatggagagagagggaaggacgggcgcttgctcgctatcgcgaagcagatcgcacttgcgagcgagcgagcctcgggtggagagatggcaggacggaacgcatcaggcggttccggttctccgatctggcctggccgggcaggcagagcgagaggcgtcctcgagtcgaggcgaggcgagtcgagcctcgagcacaagacgaaggcatcgaaggccaatcgctcgcacgctcgctcgcacggcacggcacggcacggggtttgtttgggggggggggagccaatagcgcagtacgcggcgggcgaccgctggaggcacacgccttgctctcgcgtttgcgctagactctcccctggccggatggattggccctctctccgttgctccggtggctcggtggggccctcaaacttcctccgtcctttcgcaccggtcgtccgtctgtcgtttcgtctctttgcgtctcgtcttggacgaggtcggatgacgacggacggcaagccgcgggcgtccgcctaggctgtcgccgcggcgagggcgtgggcgtttgtcgttcactcctctcaaagggtcggcttttgtcggaagatctgcttcgacaggtctgcctttcccgctggtccccggcgagggtcggccgtgtctcgctctggtttgcaggacctactcgcccgcctgctcgcccggccggtcgagttgcttcgagtgctcactcaggctcggcgggtcgcgcggggggtcagtcgagccgagccggatcgggtcagggaggcaggcctcggcagaggttgggtcggaaagagcttcgaccgagagggcacacgcccttttcgcagcatccagccatattcacccgccaccctcccccttcgccctcttcaaggacgaggaccggccagctctcgtgctgaaggtcttctggcggtccgtctgctgctgccctcctcagatcttcttggccgactcacaggctgacgtccgcctggcgttccgtcgtgccctcgcgtcccttagctacatccaggtgatgcggctcctccagaagacgtactggctcgagccggccggctcgcacggcgtctgggggttcgacgactaccattttctgccattcctcttcggcgccgcccagctcgagggtgcgctcagtctgttgtgagcgcgggcgcgtgttcaggcgagttgacccagggcgctgccctcctgtaatctcgtcagcaggccagcagcccttgctaacagcccttgtcagcgatctgccatcctgcccactttctactgacggcgcaaactctcgaccaggctgggcatgctccgtccggccatccctcctcctcatgcaatggcggccctcgtcgcgcggcctgtctgacctgacgctgacaaaaagacatcaggctctcacaattggccccctgctgactagccgagcgatgctccagggtcgcgtcaattctgcgtcgggctggctgccgaacccccctagcttgcctgttttccggccggtagacgcgccaggcactagaacgtgtctccatacccgatatacacgctcgcgtcgtcgcagagctaccgctgcggaaagagcaggcaggatcgcatctactatatcattcgacgttgggcatcagacccgtattggcagagcagcgacagcagggtaggcaaggcagagcagggcagggttcattagggagattgagaggacagagggcccggaaaagatggagaaaaactgaaagatgaccagcagagctgtcgaagggaggacagtcgtcagtaatgcgctcaggtcgacaactggggtctcgcaacttactttaaaagaaagtccgcccttgtggcgagagaatgcctagcccgaaggctaagtgacgggctgaaaagcgacagagggtcaggctctgcatgggaaggagtgcaacgggcaggcgagacggacctcaagcccttttctgctttttgggccccttccactggcgctcgcggacgacccgctcaagcttggtttcggctcgcttcctggtcggcggctggcagaacgcttttgcggggaggcaggcgttgatgttgccaggtgccgaagctccggtcgaccttggccgccgttgtctagaggccgtcgaccgagaacggaacgggcttgatgccggccatgtcgaaaggttggaccgtcgaccgccggacgagagggggagggctgccgtacctgcttgccatcgcctttgttgcgacataagcgagtgactgcgagggaggaaagacgccagcaacagggacgacgatgacggcaaaagcagaagcggccagcgcctccatctcctcctcgtacgcctgctcgcgagcgtcggccgcggccaggtcgatgtcggcctgcgcaaagatcgcggcaaacgtctcacgctccgccgccatcttctcctgctcctcccaccacgcgtcgtctacgagaagggaggcgaccggggtgccgacacaaaccgaaagaggggaaggaagcaacgcatcttgaggctcatcccgatagcgatgtgagccgagaaggccttgacctgctgcagctcggcgaaccacgagatgcgccgaccaggccgagcaaagatcgaaggcttcgagtccttgacctttaactgctcggggcagccaaagggtttggccgcaggagcgagccgtccagagacagactcggctcccttggccgaccttgcacggccgatgacgacgacgctcttgagacaggccggagcctgctcgccagcacgcgcgatgaccgcgacggcacgaggagcagagacctcggccttgacctttgtcgcccggccagaggccgagcgcttggggatccggctgatgagggtgttcgacataacgatttcttatttggacgggttaggttgtgctttgactggttaggtctgtagttgttgctaagtagcgttgtgagaggcaccgaggctcaattcggctagagacgtctggtataaaaatggttaaacgtgtccggcgagggaaaagggctctcgctcgccggccagagggctcgccttgatggaaatcgagctctccctgcggcgccgctgggtgatttcgcgggagggtcgctcgggccggccatcacccctggcccgagggccagaagcggaccctcggcctcgacctcgatcgaatgcagcatgagcctgattagcgaccgtcagcgagcaaggatccgatacaagcgaccgtcaggaagtcactgggagggcagcaagaggcgatgttgggtgaggtcagggtgcctgcccgccaagagcgcgtgccttgcgcgttctcgagaaggaaagggcgagtaaggggaaggatgtcagcgttcgtgcagatgaagggggaggtgcgagcaggctgagaagaggcgcgagcgccggcgacccccttccccctctcccccaggcgagcagatctctttcccctcaaccgcctcctcacgggcttctcaacgagcgatcccccttgtctctcatcccaggcgcaacaagatggaggctgggggtgtgaaaggccaggatgaaaggacaacagcgaggacggaccgtcaaaagctcctgcatgcgcgtgcgcgagaggccagcggccatatgcggcgggaagcccggcgggagggtcgggaagcctggtgggccgagcgggtgctgtgtgaagcctggctgctggttgggctgctgctgctgctgttgctgcgaggggttcaagggtggctgctgctgctgctgttgcaaagaggccgggccgccggtcgagccgttcgctgcgaacgaggagaaggccgacgagctaccgtgcgcctgcgatccaccggcctgctgctgctgctgctgctgctgctggagttgcggaggctgctgctgttggcgttgctgctgctgctgctggccgttgaatggctgttgctgctgctgctggccaccaaaggcctgcccgccggcctgctgaccgaacccattcggtccgccagcaccaccatagcccccttgctgctgctgctgctgagccgcaaagaaggcctgcatctgggcctgcgtcggctgctgctgctgctgctgctgctggggcgtggctgagggcccgccgccggccgtcggaggaccgaacgagctcatccggagtggggacggaaaagggatccggctgctggcttactcagagggatcgtctcggagccgaggctgctgctgctgctgctggttggatggcctcgctttggggagtgaacgaggtcgaacgagacgcgtcggccgcgggcaggtgggacgcgagaccccaatagatgaagctgcaacccatctgctgtcattcatctatctggccggatcccggcgagaggcgcagcagcttcaacccctcccttgcttcaaacccccctcgcccccgctctcttcagcatggcgccctgcgcacgctgcggctcgacccgctggcgacgcgcacccggcggcacacgcgtctgcgaagaaggccacgtcgacatggtgcgccccagccccaacaggcatgagacgcgagactactggtcacgtttgaacgcgggggccggagccggctggatcgtggatgcgatcgggggcgaatcgacaagtacggtcggcgagggtgccggggcgagaaaaatgaagcgatgtggcgatgcggccggccgagccgagccgagacgagcaggtttagcgtgcgtggcgagcgcaacacgtgcgcacgtgcatactgaccgaccgaccgcaccgactgactgaccgaaccgagaaccgacagaatcgagccccgccgtttcgagcttcgacgacgacgacgacgcgacacccctttcgagaggcgagccgagccgtcctccgcccccccggcggctcctctccgccgaatgggtcgaccgccctctccctcacaccgcgcgcacctcgcccgtccgcccgcccgtcgctcaatgcgcgtccgaacccctcggtcaagagcgacgctcgacctgacctcgcactccctcaggctgacgccgcctcttgctcgtcgtcctcgaccgccggctcgagcaggccaaagacgttctcgcccgagtaggtgatctgtcgtcggcggtcggtgggcggtcgacggacgtcagcctcgttactcagaagacggggagggtgaaaagcgtgaggaggagagaggaggggagggttgagagtaggaaaatgagaggaaacgagcggaatgcgacggaaagagagagggggaagagagtctgtgagagtaagagagaaagagaaagaggagaagggagggaaaaggcgggacaaacgtaaaggaagccatcctcgtccttgtgctcttcatagatggcagacatgagggctgccgttggcgggaggacctggttgtggcgggcacggggcgggttggccagaaaatcgtcagtattctcctgccgcgtcttttgcgagagtctcgccccaggtcgaggctccaatgtcggttcctgcagcagctcaacaacccgcttcgccagcccccttaggattccaggagcatccagccagaccgaccagaaacctcggaggagagaagaagggcacgacggaaacgcacctcgtcgacaaagatgaagatggccttctcggcgggtagcttgatgcgcttccggatgacgtagacaaattgaccgacagtgaggtctgaggggacgaggtatttcctgtgccgggcggggaggggggaagggacgtcagtgtccccccccccacgtgcgaccgaacagccgagctcggcagcgtcttcttcagcgtgcgcgagaagaactttgacggccgcgagcggagcacggtcgcaaaagagttcagcaagaaggccgagcttgagatggagatggcgaagaatcgcgagacgtgcgtcgtcccgccttgacaacgtaaagtcgcttgcgaaggctgaccctcacccatttctcacaccctcgcgcagggcggccaagaacctgctcgagtcgcagcgcgcgtcgacaccctcgtcatcgacgccccgaatcgccggctttggccagacgcctcgtcggacgggcggtctgctcggtgccgctggccggctcggtgtagcgggcgctggaggaggaggcgggtcaacgccgagacgcttgggaggcgcaggagggtcgacaccgaggaggccgacgggcggcatctgatctcggctgtggtcaacaactggacgaatgctctttgcccgtccgttgctagctccgtctcaagtcaggcacatctgcttccctgccgggaccgagcatgatcgtagcgaagtcgatggtgcgaggacggaggggtgcagtcaggcagcggaccttcggagccccacgccgacggtgcttgctgcgcggcggcctagcctccagcccgctcccccttctctctctcgcacccggcttgcagatggtcgaaggtatcctccgagcaacggccagattaggcagccggacttgctggcctttgcgcctgctgttggtcgcggggtgcctggcagaccgatgtcgcaccccggcgcggacgagcaaagagtggaggaagaagggcgtcgcatgtcataaggagtcaaggggaggaggcaggagcagaggagcaagcaagagggaagacgagggcggagggaaggggtcgacgccgcctagaagtcctcctcgagcgtgaaggtctttgccgcctttgcgtcgtggaccttgccgtcgccggttgattggttgacgcccgacttcgagtagtcggagacgcgcttctcgaaaaagttggacttgccctggagagaaatcagttccatccactcgaaggggttggttgcgttgtagaactgggtgcggggcgggaggtgaaggggtggttagtgctctgatcagacgaaggggagaaggaggcgcagcagccgcgggcgcacctgtttattgttattatcattatggaggggggttagctgcgcgcgagatggtgggaagggagacgagtggatagccaaagccttcgtcggtcgtccgtccgtctgtccgtcgtcgtcctcatccagatcgtcctcacccagcagagaggaagaggaaaaaggaagagcacagacgcacgcatagccgcagtctcgcaaggcctgaacgacgagccggacaaagtctcccctctcgacggccggctgtccgacgagcgaagtgggatacattgtccctaatccggcagggccaggggcggagcttccagagggcctcgaggaggaggaaggtgagaaggacgcgccggcgagagagggcccaaagggagagatagagggcatcatcgcgccggcggaggaggaggttgagaagggtcggtggtgagcgtcgtgcggcggtacgagggtcgacgacgacgacgacgacggctcgtccgagcgggcggcgctgctggacgggtcggtcgactggggcatgcgtattgatgtgggcaggaagagggaggaagcagggaagcagggagggagggacgacgaaggggtcgaggttgggagaagggaggcaagacggacatcttgctaccgacacctcgacacgacgctcttataggatgtcgatagcggcagacgagcagcatcgaccatggatttagacgactcgaccagcctatcgtgctgacaaccccccccaagaggacagcaagagagtcatcgtcgacctgcctcggccgctcgcccctaactcccaccgcctcctcgtcctctctagctacgatgcctccccgtctcgtgcacccagcagcccgcctaagccggctcccttctgagctcttcctcgccctccctcgacggcgcgccttcacctcgtccctcgcccttgccgcccgccagcagcagcagcaacaggggcagagctcgaccgcgccctcccaggccgtcccgcgcctcacgctcgatctctctggcaacgccctccatcgccggcaccaagggccgttcgcgatgggcacagggatggacagcgttgtccggcagggctccgacagaccttggagcgagctcagcgtcggttcgaaaggtgccgccgtcgtcgtttcccgtcctcttgcttctttcacctcgctctgcctaccgtgcctacgctcgctctcctcaacccaagctgacctcccaccacccctcccccttccctgattctttttttttgttcaagcagaagacggcatacgagatgagcgctagtctcgtgggctcggagatgtgtataagagacagcctccctcccttcggcccacctcgggcgttacacagcagactgaccgaaggacgttgtgtgtggtgctgttgatgggtgtaggaccggccggctctactttggcaggaacaaggtgatggccaaggcgctgggtacgacgcctgaggacgagcttctcccgggcctttacaaggtctcagccgtacgtccccccctttcctttgccccccttactccccttgctgacacgctgctacttccactcttgccgccgactctttacagaagctcaacggtccgaccggcctcttcttcacgaaccacgacccaaaagagacgcttgagtggtttgcctcgttccagaagccgacgttcgcccgagccggcaacgccgcctcgaagggggtcaccctccccgctggaccggtcgtcatgtacgacgacccttcgtcgcccttcccgcactcgatggacccgcagttgcgcaagctcgggctccacacctcgctcgtcaagggcgtccctactctcgccgtcgcacacgaaatctgcaaggctggcaagcccctctcggccgagcaggcccagctgctcaagctcgtcggcgtcgagatggccacgttcaaagtcgagctcggcgggtgctacaccgaagaggccggcttcatgcccggcccgcacacgccagagagcccgccgacaaaggcgctcgtcgtcaagcccggcgaggagcccaagaagccgaagggcgtcgaggaggagtttgaggccgagatggacgacgaggatgacgagtaagcccgctatgaacccaacgccccccctactttctatttcttcctttcccacgttctctgcatgccttttcgctctgaacgtaacatcggccggattaggagagggttgcatgagacattggggctgcactcgctcgctcaaaaccggttgctcttcagccatgcctcgaccggcttggcatcgcgctcgacccactttgccttggcctgaatcgcctcgaggccctgagcgagggccatcgtgtacctgcgtcagtcaggggggggggacagggcgcgtcaggaacagcgtgcatctgggcagaggcttcggagcaagaagggggagggggggggggaggacggatgaaggagggtgacgacggggggaggaaggtgagctgcatggctggagcagatggggtgcgatggaagggggtggtggtggttgaggggcgagagagggagagtgccacgtcgaccggacggacgacaggacagaggtcggttcgaccgtccttcttcagctttagtagatcgagcaaggccagtcaggaggcagagcagcctgacctgtcctaagcctgcatatatgttcgacacgctcttgcctgccctaccccgccctcctgccctcagccggtcagagcagcacggactgcggacgacctctctcctcgctcgcgcctctcttcccccgacgtcgacgtgcctacccgcccatcatgccttccctccccaacccctccccaagcaccagcatcgagcgcgcaaagctcgccaaagaagcaggcaacgctcacttcgcccgcaaacaatggccagacgcgatcggtccgccttctctcactctcctccttgcccgtcgacggtcggcgttgaggctgctggctgaccctgcccgtgcgactgccgagggcaggatgctactcgcaagcgatcgtcttggacccggggtcggccgtctatccgctgaatagagcgcaggcgtacatccagcttgagaagtgagttctttgttggcgggctggtcggtaaggtgttgctcagctggtgcttgacgcgttaccgaccccttgccccgtgcctcgtcttgccccttgctcgccctgcctgggcccttcgcctcgcccacgcactcgctttggcttcccctctcttgctcgtgctcacacctcccttgcgctcgcttcgacccgcccactcgtcttgcctcgcgtcgccctatcccgccgcccgctcgcccgctcgcactcgccttgcacacccccgtccctctcccgaccgcccggccgccagatactccgacgcagcccgtgactgctctaccgcgcttgctctcgaaccggccaacgccaagggctggttcagacgggccgtcgcgcgccgggcgttggaagagtgggagggggctgcgaagggtgcgttgcgccttgctcgttggttaggagggagggctgcgcactcaagaagctgatgctctcgctcgctttccgaccgactgactgcgtgcatgactgcatccgttcatacctacctgcctacctgctcgcaacgccgtcgctccccccccccttctcgcttcgatcgccccgcagatcgccgcccagatctgccgccaagccggcctcgtcaagcgccccggctcgggcaagggcgtccacgacgggcacgaagacaacttttccatcgtctttgctgcgatgggcgtcaacatggagacggcccgcttcttcaagagcgactttgaggagaatggctcgctcgaccggacgacgctctttttgaacttggcaaacgacccgacgtctgtcgcccctcctcgacctcttgcattttgtggctcggctcgctgacgaccccgcccccttcttccttctcgcgcaggatcgagcgcatcatcacgccccggctcgcgctgacgacggccgagtactacgcctaccagctcgagaagcacgtcctcgtcatcctgaccgacatgtcgtcctacgccgacgccctccgcgaggtctcggccgcgcgcgaggaggtccccggccggcgcggttacccgggctacatgtacaccgacttgtcgacgatttacgagcgcgccggccgtgtcgagggccgcaatggatcgatcacgcagattccgatcttgacgatgccgaacgacggtgggtctgctcgtgggcgctcggcgcgaccgggctgggtaacggaagctgatgattgcttgcccgctcccccgctcccccgccactagacattacgcacccgatcccggacctgacgggctacatcaccgagggccagatctcggtcgaccggcaggtgcgcccctcgggcagcaacggccactctcgttttatacgagctgactgacaccccctccttcctccgccggcccgcacagctgatgaaccgccagatctacccgccgatcaacgtcctcccctcgctctcgcgcctcatgaagtcggccatcggcgaaaagctcacgcgcaaggaccacggcgacgtctcgaaccagctctatgcgaagtacgccgagggaaaggacgcagcggcgatgaaggccgtcgtcggcgaagagtcgctcagcgccgaggaccggctcgccctcgagtttctcgagcgctttgaaaaggagtttgtcggccagggccagtatgagaaccggtcggtctttgagagtctcgatctcgcgtgggacctcttgcgcaagtaccccaaggagtcgctcaaccgcatctccccgaaggtgcgccccttcccggcgtgtcgagccgccggagcgatggccgaggcgaggccgtcaggggcgagtcaacgagccggtcctcggtctcggcctcgccagcggcatcggcgtccgagacgagcgacgagggtcgaatgacgtaagagggaggcgaggccggcggcgtcgctggcaggccgacctgcgacgacgacttgacgacgtcccgatgcgggtggtaggtcgccgtccggatcgcagccgagtgcggcaggatgaggacaggcgacagcggccgggagagcggcggagagagcggcgcatgctgctgatgcgagtgctggccgaccaggtggtggtgcttgcggccgtgcgaggcggacgggctcgtgctccggctgccgcagggcgagacggccgacccgaccgaggccgtcggcgaggtcgagctggcagacggaggcggacgccaggcgaccatccggtcgtggtctgcagaaagagcaggaggcgacgtcagccggctaatgcaggggcgtcgtcggggtcggagcgcagacagaccagtcacggcggcggccgccttcgagttgcgccggagacgccagctccagcccttgtttttgacgagggcagggtcggtcgtcgtcgtcgtcgtcgtctcgatgtggagcatcggtttggcctgcgactgaggctgctgctgggatgccgtcgaagacgaggacgacgacgggtgaccgagcgtcatggcacggaagacggaagcgaccgacagccggccgatctgggtcgagggcgagggcgaagaggtcgacggtgaggtcgaggtcgaggtcgaggtcgaggcggcgacagcaacggtgcgcatcgtgcgagtcgtctggagcatcgacttggtgcagagggtgggtggtcgatcggttaccgacaagggcgagcgagcgagagagtgatgcgttgggcgtgcgagggcctggggttgggataaggttggctttcgagcgctcgagggctgagcaggtcgagcggagggagctgagcgtgcgtccgtgcgtgctagggctgacgtcaaggagaagagagtcgttgggagccgagcagagccgaggaggttggggcaggggcggcaggagctgggggagctggcgcagggcaggtcgttgagagtaagtgggtggtggttagcttcctcctcttctggtcgactcgcctggataagtaggcttcctctacgccaagctcgacgagccgatctggatgaccccaccgcccggctacgccgactcgcccgatcagctgtgctacgtcagctcggccgtctacggcctgcgccagtcgccgaaggctttctacgaccgaatcgcttcgttcctggtcagcatcggcctcgtcccgattgagtcggacaagtgtgtcttcctcggccagcggcacggccagaaagtcctcctcatgctgtacgttgacgactttgtcgtcgctggctcggccgagggcgttgccgacgtctttgcggccatcgggcgcgagtttgaggttgacgaccgaggctcgctcgaccctggtgagctgctcggaatggagttcacccgggaccgggcgaccggcacggtcagcatcacacagacggcctacattgacgaggtcctcgaccggtttgactcgaccgacatcgctccgcgccgcacgccgatgaactcgaccctccagctctgggatgccgattgtccgtcgaccccggacgtcagcctccgcctgcggtatcaggagttagtcggctgcctcaattacctcgtcacctgcacgcgctacgacctggcgtacgcagtgggagtgctgtcgcgcttttgcaacaaccccggcactgctcactgggaggccgccctccgcatcctcgcttacctcgcctgcacgagggccttgttgaacgacacggccttgcaggggacaaggcagtcgggtgaacgcttaagatacatgaggacttgcgccttgaaaattgctatgagggaggaagccgtaagggcaagagagtgatgttacggagggaggtaaagcgtgttacgttcgatgaagcgtaaccctaacttccggcgccgccgcgcgggcgggcgctgcagcgcgccggcgctggcgaccctcccgcaaaactaccacgacgctcttccttcaacactcccactcgtcgtggtgacctcccctcgacccatccagcgctggaaagggtgccggcggccaagagccagctgacccggaggaactgggcggtcaagctgacccaggagactgacttggccccctccagagcctgcggctgaccaagatcgacccgagcgaggtcgaacgaggtcgatggcgcgccctccacgtcgcaagggcctgcccaggtgtccggctcgagcaggacaaagtcggagctacgtcggaggcgagctgaggatgatggtcaggaggaaagacagggaaagacagcgcgaggacgcgtctcggagggacgagctcgctgccctgcaacgcccaccatctcgtcttgcttcccgtccctctttcgtctctcactctctctcagcatggctccgcagtgcgtagagactagggcgcacgtccagatggcagcgtgctgggccagactcgctgacctcttgccgctcgcctgcagatcgctcaaggagctcaagaaggcggcggcctcgacctcgaccgcgtcgttgagcaaggcgaccggcagcggctcgtcgctctcgtcggcggtcgagacactgacgagctcgtacaagcggtcgacgccggccaaggtcaagctcatcgacggcttcctcctcttctttgccctctcgggcgtcgcccagatggcctactacctcggcgtcaccgcgttcccgtacaacgccttcctcggcgggtgcgtgcgcagtctccttctccgaccgactcttcgttcggctcgagggcgctgctccgggttgttgctggcgactaccagcctgcactgctgctggaggctagccggagccaagctcctggtcgagctgggaccggccgaacgatgctccgggagctggcctggccgacgaccaggtgtcgctcgcccatcacagcccacgcccgaccgaccttcgccctagccttcctctgtcagcccccctggctgacaatcttctctactccttgccgctccccgcagctttgcatcgaccgccggccagtttgtcttgctcgcctcgctccgagcgcaggtcgtctcgaacctcgcggcggccggcgcgccgtcagcgtccccgtcgccgttgccgtcgccaagtgcgcctgctgtgtcgggtgcgggcagcaaagcagacccggcagaggcggccgaggagtttgcaggcctgtcgagtcaacggtgcgcctcgctgttgtggccctgacggcctacctgtcgtatcctccgactgacctcgtcgccctctgccccttccttcccgctgctagagcctttggcgagttctgctttgcctcggtcatcctccactggtttgccttcaacttcctcggctgaccaagggccggacggaagatagatgcgcctggaacggacgaagcgctgacccaaggcagcaggtggagaccgatatacgagcgcccccgcccgggcgcgcgattcgacgccaaggagacggtcgtggacgtacgttcaagtcgtttctggcggtgcgagcggagcggacggaagtcgtcgcgagccgtcgtcgagcgagcaagcgagcaagggcaacaagtcaggcaagcaggccgaggccgaggaggaacgaagggcaagggggtcagagggacgttagttctctctcgtctattcccgctttcggccttgaacggctcgacctcgcgccggagagaaggaagagggtcgcacgaaagaagtcgtgctgatccgagtgagagcgagcgaacgggagcgaaacgaatggccgagggacggacggacaggcagcaaggcaggaaaagcaaagcaggacgaggagcggcgagtatcagttcagcccgcttccagagtcgaccgccgctccttgacgcttcctctcgagccgaccaataagcgatggatgcctgcctggtaggggaacgtacgttctatcgagcgagcgagcgaacgtcaagaagggggcaagaagcaggccagtagtccgactgaagaagcgccaggcgcgtcattccgcccggctcggctcgaaacgcccctcgagcatccatcggacgaagccggcgcgacgggccctgctctgctctgctctgctccgacgacgacggcccgatcagaccactctcttcagcccgcccggccggctcgagtcgagtcctacttcgtcccggctcagcaccagccagaatatgcgcaagcgagtcacgctgactccgacttgacccgacccgaccgaccgaccgagtgaccgcgcgtttcaagtcgagcaagacccatcaagtccagcctgcattcgtcgaccgtcggactcggacagcaacgagccgtccgtctaccggccgtgtgtatgtgtgttcgcagtttgcccctagtgccctgaccctgcgcaggccagtctcgatcggcctctctcgaggacaggcagacaggcaagcaggtgcatttgaagacatgccaggcgggaaagatggtgggtgctaggctacagtttaggtggtcaaggggtcgaacagggacagcaagggagtaaagaggaggaggaggagggacggcgtgtatgggcgcgagcgacgtttagttgatgggagatgtaaaggggggggggggggggggcccgcccaccgcgcgctcgaggctcgctcttctacgcgacttgggccgtcaccgtccttccgatctggctcgtggcgcccgcggcctgggcggcggttggcgaggcgctgtatgtggctctctggcaaggggaggatgtctgggacgagaggggctggagctggaaggcagcgctcggatgggctgccgtcgaggtcggtccatgtcgtccatccatcgtctactagctcaggaggaggtcgagctggggcaatccgcagcaacccaacgccgtcctgacccgcccctccgccccaacccgctcgacaggccgcctggtcgctctacatagcccaccgcgcccgctcgatccagccgcccctggccatccggcccgagcccgacgcccagctcggagcgatgttcgaggcgatcctctctgctggtgctggggcgggggcagtcggcgcgggagaagggctgcttgttgacctcgagctcgagaaggacgaggacgaggcagaggccgaacagacgctcgagacagtcctcgacgacggccttgcgctcgaacagcagcctcctcttgcagcaggagccgacagggggcagccaccggtgattgaaaggcttgagacggacgatccgcgggcggtcgagtttcgcgagaggtccttccccccccccttccccttgggtgtccttcctctctcgccggcttggctgtgctggcctaggctggtctgcatactcgcacatcgaccatctgcccaggcctccttctccccgacctcccgcccgcgcccgccaaccccggaagctaaccgtctacctccttcgacgcccatgataggatgcgcacctggttcttctacgccgactggtcggccatcaagcgcgacaacatgctcgactggatcgcatggtcgagtttccggtccgtcctcttcctcactgctcgcttactgcgtgcgccgtcggacgctgctccgcttggcagctatcactgcgctcctcgctttctcgaccctcgctctcaccctctttccctcttcccaatcatcgcctctcccttttccccttccctccactccggcctcccaaaccgaagcgtcctgactgacctgcccgtctgcctacctgcctcccttccatcctcgtcatcaccggacaccctcccccccccactccccccctttcgctaatctcgtgggctcggagaggtgtataagagacaggatcacgcaccgcgtcaacccgctcggcttctagaccgagcacagcagcgaggaggctcgctcagcggagaacgagccttgcagcggcaggctgcagcgggctgtcgctcacctgttgggacccgcacgagaaggtggcctcgctgcgactcggccgtccgaccaacggcaggcgagcagggacgaagcaggccgctgtccggtcgctcgcccatccgatcgggcctcttctcgcaatgggcgagaagaggggcatcggtcatggccacatggtcggccctcaaccttggtggtcgctcgtcgagctctacgccagccggcaagccctggacaagttcacaatagcagcagaggctgctcgggaagaggcgcgcagtggcgttcccctgttctctgacgactgctttccctttctttgtacgatgcgcactactcacgaccggcaccgcctccgtccagcgctcggcgaccttgcggaggacggagcatgcatggaggggctagaagcaagaaggaggaggctgagcaagcgccgggccgacacacgcgaaggtcggagcaaggggcagggaaacgaggcgcgagggcagctaagactagcgtccgaggtcgatcgggtgcggcacagtgcagaggcgaccgcgcgaggcaagcgaaggggagatgtagcgtgtggaggtcggaccgacgacccagaggatgcatgaggtgttgcttgacggtcaccaccttgaggtgggtcgaggctcacaaggctgtcagcgcttgctaacagggcggcagtcgagactcggtcgcgaagggggcgcaccagcgaaagaccctcgggggttcggagttccagtccttttgccagacaaccccttcgtggtcgacgaggcaaactccggctgcgtatgggcgagaagctacagcgttgagccggttgactatggctgggcctagcggatgtcgcggagtgaagcagtagtagaagctgatgacagtcgtcagagacggcaggtgtgcgcggatcgcgtctgacgtgagcatctcaaacgccagcagatcggaagaaaactcgagcgtttcaagggatggcaccgactgccaaaggaccgaagtgaagtccaggccagagatgctgagcttgcgtaaatggacggcgaatactgttacttagaaacggatgtgcaaaaagaatacgggcaagaaatcattagacgatctggccatacagccttttcatactccattccctcagccagccttatgaatgtaaaaaaattgtcctctaaacctttgacttttgttgtcactgtagatgttgcaactgcaagccgatacgctttacaaagtgtgttgttccaaaaaaatggaaagggtgaagccaggcctattcagacctcgcaaagagcgcagtggcttgaacccggtaagcatgttttgcaatttacctttgacaatcacaatcaattatcggacgataacctctatctgggttatttacgcttgatagactatgggcagttaaaaactgtgtatcaatacaaccaacctgtcaagcttagtcagttagtggattaatgaatggcattattttcttctgtcactttgtttgagggcatagcgttggctattgcccttcaattcttattgcttttctgggttttgataaaacaagcacagcaaaaaaaactgaccgaacaacttggtgaaagaatacaacaggcacttatctctcaacttcaccagttacatattgatttaagccaatcatatcaaacgagccaacaatttattaatgaaaagatagctcaaggacaactggctacacaacagctcattagtgatgccatacaaagacaaatggccgatgtcagagagcaaatgactcatagcttcaaacatcatgcgagctcactcacttctcacttacaattactaactgaggaaattcgtaatcatttaaacacactaactcagcaggttaatcacaaattgaccgaaggttttgagaaaacttcgtctacttttattgacgtggtaaagcgattgaccatcattgatgaggcacaaaagaaaatcaccgaactctccagtcatgttgtcagccttcaggacgtattagtggacaaaaaagctcgcggtgcttttggtgaagttcaattatcaacactcatcagcaatatgcttcccagcgcaagttatcaaatgcaatataccctcagtaatcaaaaacgggctgactgtgttttgttcttacccgagcccacgagactaggcatgatctcgtatgccgtcttctgcttgaaaaaaaaaaaaacaagaaccagaaagggcgaaagcgacggaggtaatagaggaagtcctgtcagccctttgcgcacgacgactcggaggctgggcggcctcctctgaggcgggcaagaacaataggggtgacagaccatcagcgtgttgagctgctgacatatctgaaatcccgtcgccacagaagaagatggtcggtcggtgagggagggccttgaaggggaggatggcctgcgacttgtcctgccagtcataagagggtggtaaggggtcagtcctcttggcgcacgccaggaaggaaaggggaccgaacatgaccgaacccggactcgggatgccgatagacaatcgaccagtcgttcggcccctctccgcgatcgacatcgttcgcgacaatctcgagcgcggccgccggctcctcgccgagcgtctcggcacagattgcacggatgatgggctccatgccggacgagaccaggatgagggggatcggcggcgattgggcacggcaccagtcggagaaggcgatgaagcccgggtcgagcttgatctctgcgcaggtcgaagagaggggaacggcgtcaaaaagggggcggaggggggggggtttgttgctgtgcggtcggcgagaggacgggaacggtccagccgccctcgttcaagagtagagccgcgagcacccagggaccgggatgtgtcctccgaccggcattgagagagagagcgagagcaagcggggggcgagaagtcaaagagagagaaagagaaggaagaaagggggacgcacccttcctcaggaacgcgaccacctcgtcaaacgtcttgttcggcctgacgctctccaaactctccctaaagcagtccctgaagcacgcgccgtcctcgcccgtcacaattttttcccagagcttcctccgggcgtgggaccccatgccaaaagcgtcgatgacggcgtcgttcgagtcttccgtcgtgatggtgccgtcgaagtcggagaggacgaggaagggggcggtcgcatgcttggcgaggaggtcggagatggcgagcatggtgttgggttggttgtgggaaggctgattggtgggttggaagggaaagaggggggggaaaaggaggtcggctgggaggggtcgaaagagggaggaagggagcgcctgatcagttagccgtctgtgcccccccccccgccgatatacgagcttcttcccccctctctcctgtgccgctcccccctctctcgcgctccctccaactgacccccaatctctccgcctgcgccagatctggctttacctcgaggcccgccagctcgcggcgaacgtcaaggtagactgggacgagttcatccggtacgacatgctgacgccgaacgtctaggctcggctcgaacgcgaaggaggaccgagcggcggcctgtctggtcccaatcattcccgaaccgcacgggcttcgcgtctgcgcaacgacggctagcctcgtcggtaagcagccaccaccggcagccatgtgtggcctttgctgcctccaatcaccctcccctcattcgccatcctacccccctctctagcctctcctcctagattgcatccgtcctgagacccgacttcagccggcgcctgtccagcgccgcgctctcctgccggacacacgtccactagattcgtccctcttctcctcgtccgtcttgcgtcctgccttacaccacgacacatccgactttcgtttcgccccttgtatgccatttcgccgacgccgctagacagtcgagggctgaaggcggacagtctgagcatcctcgctcgtgcgcccgtctcgttggatggcttctcttcgttcggacaaacgacgcagacggcgtttcaggagctgcacgcgcagcctacggagcgtcgattgacgacgacgacccatgatgccgctcgttcttcctcgacgatggtaggaccgtacgcgagagaggattccaaaaggtggcccatgagtatgaagtacagacgcccctgcagtgaggggcgtgtcccagtgaggtgtgtagaaggagatgaatgcgtggacagttgtacatgagggccccccaggtgggagggcccgctgccggagctggtcaggcgaagagagcggcggttgctgcagcctggcccgaacccagcgcctaacggtacggcttgccgacctcgcccgccgtcgccgtcgtcgttgcgacgggcgcgatcgaccgtttatggaacggcgagctcgggtcgtggatgatgtgcgacgacctgagccggacggggatgggtgcggcgtgcgggacgggcgggtggcggacgaagaggagcgggttggtccgctggcgttggagccggggcttgggcggttggaggggaccggccggacgcggcatgacgactggttcggctcacccccgtcatttgaccggctgcgcgtctttggctgcacggcgtacgcgcacaatcccaagcacaagaagcaccaatcgaagtcagtgccgtgctggttcatgtgtccagcggaagacgcattcggaaagaaggcgtaccgtttggtcgacaagcggaacccgcacaaggtcgtcttttcccgtgacgtcgtcttcgacgagggctggacaatgcgcacgaagggtagcgccagcagtgggagcggccagacggccacgatgacgccgttgactagccgaatgccgctcggccttgaccttccctcgtctccgtcgggtccggcggagattgaggatactgcaggcgtcgacatggaggaggagaacaggaccgggacggacgtcgagaccgtcggaccgaaaaccgacgacgagttgggtgcgggcgtcttgtcagaggacgagctacgtgaggaggaggaggaggaggaggaggaggaggaactggccccgctgccggctgtacctcgcttcgtcgtctctaacccctccctcacggccacccgacgcacgtcgggccgcaagacgcagcttcctgccaggttccgcggacccaaccaggctaacgtcctgatcagccttggtcagcgtccccctccggccgcgccgcccaagacctacaaggaggccgtcagcggactttaccgggccgagtgggaggcggccatgaaggccgagctcgatcagttcgagaagctcgacgtctggacgctccgtcccgtccgcgcctcgtccccgccgcctccagtaatctcgggccgctgggtctatacctgcggcccgacctcggaccccgagatgaccaagttcaaggcccgctgggtcgcccgcggctacgagcagcgcgagggcacctttggtgacacgtactcacccgtcgctgatggtacgtcccgccggacttttctttcaatcgtcgccaacgagggcctcacgatccgccaaggcgacgtcaagacggccttcctctacgccaagctcgacgagccgatctggatgaccccaccgcccggctacgccgactcgcccgatcagctgtgctacgtcagctcggccgtctacggcctgcgccagtcgccgaaggctttctaccccaccttcccccacctcgcccctaagtccgccatcatgagctcgaccatctactttgtcgccggtgccagccggtgagtacagcacccagctctagctcgactctcgaagctaaccccttccctcgtgcgtctctctccagcggcatcgggctcgagactgtccgtcagctgtcgctccggccggacgcgctcgtcgtcgccgccgcacgcaatcctcaggcctcgaaggagctccaggcgctcgtcgccaagagcgagggcaagatcgagacggtcgtcctcgacgtgacggacgaggcctcgatcgccgtgcgtcgacctgctgtcgaactggaaatgccccttgctggcccctgcgttccccgtctgactccttccgctcgctcgcccacaggccgctgtcaaggcaacgcgcgagatctcgttcgtccggtccaacgcaagctcgatcgacgtcctcctcctcgtcgccggggtggccagcggcgagggcaagggcgtcctcgaggcgacgtcggccagcctccgggacgacatggcggccaactatgtcggcgccgccctcacgacgatcgcatttatccccttgctccagtcgagcctgaagcaagggccggccaagattgtcgtcatctcgtcggccctcggctcggcgggtgtcctgccccacctacccgacggcttcaaggcattcgccgccggttacagcgcctccaaggcggccatcaacatgtgggctcggaagctcgcctacgcgctcgccgacgggtcggccaacgtcccgcgcgagggcggctgggcagtcggcctcgttagttcctggttcaggcgcttttcgctcgcccttcccagtgctgaccctttgcccgcgctcctcttacacctcagaaccacccggggttggtccggaccgacgtgagtcgacacttcctcgtctcgctcagctatcgggcgtacttgacctgactcgagctgcccctttcctcttgccgccgccgccacctagatgaacgccaccatggatgagtcgaaggctggcatcccgatgatcaacccggacgagagcgccaagagcatcctccgcatgaccgacgacctgctgacggtcgagacgtcgggctccttctgggatgagaacggcaagaccggcagcgatttcccctctcccactcgcccccctcccccccccctcatcgtcccttctcttggcagccctatggctgactcccatcgcgcgttgctcgcccgatcggcggcgttgcaggtgacgcccgccgactgggcaaaggagtgcgaggccgttggcgaactccaagagtaaagagttcgccttccgtcttgcgcacgcaagggcggatgcccaggccggacgctaggagggcagggggatggcatgcgtctttccgcggcagagcgcgggtcgcgagagaattcaacagaaatcaagtttgggtgtcgaagttgagtgaagggcgaaagcgcaagtcgagtcgagttggggtcgagtcgcagacaaaccgagggtcgagatgcgcattcctggggtgtgtagtcgttacatagatcttcaacagcgcaaggccagcagacaggacagaagcgcgtaggcgagggtgagaggcgagggggggcgaaaaggtgaagcgagggactacaagaagggggtccgcgagacgtcccctctgcgctcgagcgagccgcccgaaccagcgggggcaccgccccttccacacctcccggggtccagcgcaagcaaccgggctaaaaccgtccaggctggtgcgggtactcctcccgcacgtagtcctgctgcccctgctgcgcgtgttgctgctgctgctgctggccataagccctttgctcgtgcagagggaacggctgacctggctcgtacgacgtctgtctcccatggctcgctccgccagccggcggtgaggggtggtcgtacgtcgtttgttggaaggaggaaggggcggggtaggcgtcgtacgatggctgacgggcgtgccgctctgcttgcccagaggcgccgtacccgccgtcgcggtcgtcgtcgtagtacccttcgccgtcctccctcctgctcccaccagcgccagggccgccctcaaacgaccgcctttcgtcggccagctgagatgaccacgggtcgctcgccggatggccgagcggaatgtcttcgtctgcgaagcctccgaagccgtctttgccgccggcgacaccggagacggagtacatcgacatgtaccgctgcgaagaggtcggtcaacgtcagccggaggatcgctctgtgcaggatacgacatcgggagagaagagagaggttttttttttcaagcagaagacggcatacgagatctgcgcatgtctcgtgggctcggtggtgaattcctgtagtagacagaacatttttccgggaataatgtcgtatttcccggtcgccataacggcgaagtcggtcgtggagatataatcgatggcctggtgaataatcggatgtaccgcgtatttctcccgaccccagtcttgttgatcgcaaataatcatagcgggttattcctggtgaatgacaagagcatgccattaaaccggcgggcggaaataaatgtgttatttctgcccgccgggcaatatgcctgacggcagtgacgttatcgttgttgaatttttttctggtagtgttccgttccctgacgaatttgatccaggatcaccgtcaaggcccagaatttctccagtacgttgtctttggtcacccggcaggtatcgtgttcaaaggtgccgagacgctgatgatagattttggcgttcttggggtaacccagcgtttcggtaaccgccgtcagcgacagaaaggtcgccagttcctgcgccagttccggctgctgctggctatgcgaatacagccactgatacaactccgggtggaagttggtgaacacgccgctaaagcctttggagccggcgcgcatcgccggaaaagcgatggcggcgttggcgttgatgatattcagcggcgtgccggcggtgagtttgacccggcgttctaccgttggcaggtcgcagctcacgtctttgagcaccacaaagcggccgctgttggcgcagtgcatcagttcgtcatccgtcagcaggcggcgatacggcgccggacattcgtacaggccgagcggcagcgttgccggcagcgctgccagcaaggtgtccagcgtgctgaaaaacgtcgccgaaccttggtttttcgggtccagatgattggtaaccagcaccagcgcgtcgatgccggtttccgccatcgctgtcagttcggcaatctggtcgtcgatagcgtcgctgatgtgaccggaagcgatcaccggtatgcgtcccgcgacgcgttccaccacgaaacgcgccaggtcaacacgctcctgcaggctgagaaacagcatttcgctggactggcagacggcgaacagcgcgtccacccccttgtccagatactcccggcctctcggcaggcccaacatctgaaaccggaatcgccaccactgcaaccgcactcaccaccaccaccgccgcctccgccgccgcccgccgccaatctgcccactacgcccaccaactcgcattcgtcgaagccctgctctcacgtgctggcctacttagcgcagttggggccaagaccggagaggaggtggacggcggcggcgaacaagagagcgacgacgacgagggacggcggcgcctcctcggctcgagcaagccggcagacgaccgcaagaccctcgtccgcagcaccgccagcagcggccggcaccagcagcagcagcagaagcaccatcagccgatcggcccggcccgctggaaagcggccgtccaaggcccgcttttgatgcgccctgctcctcctcctctcgacggcgacgacaaagaggaggaggaggaggaggaagaggagacgctcgtggggctcgcggtgcttggtgattcgagtacggcgggcgtgtttgacgccgccaccgacgcggctgggcctagcaccaacgccagcacccacgctgccgccggagcagcaggcgccgcagcgcacgtcaatgcgctcgtcagcctctcgtcgaccggccggctcgccgtctttcttgagcttgacaagcccgaggctgtgttcctgccggcggcgcatgcaaacgcttcggcctcggtctcggccgcgtcggcgagcggaggcggtggcggcggcggtggaggagggcggttcggcgcgtcctcgctcggcagatcgcgctcggcggcggcaagcgcggcgtttggcgagtcgacccagtcgggcaagcggctcctcctcatcggccactcggccgccaacgccgacgacgatcaagaggacgccccggcccatgcagcaccgacgctaacgctttacgagacggccctcatccccctcctcggcgacgacgacacgcggccaaccgcccgccccccgctcctcggcatgcaccccgatccgctttaccccgactcgttctacctctcgggcccggctgggctctttgcctgccgcctctcgtacctctccaccctcgcacgcgcgctcgcgcacccctccgacgcagcgagaaaggccgccgtggagcggttcgcagcacgggggctgtctgggagggcacggcagtggtggtggtggcggcgggggtagtctgctagccaacgccggcggctaccacgctcggccgtcgtcgtcagcgtcgtccttcgaacccggaggaggaggcggctcacgccagccgagcgtggcttccattccgtcgctgtcgaacgcgtttgggacgacgggcggcggcggcgccggctttggaggaggaggtgcggggccaccgtcttcgtttaggctgaggaaggcgacggccgctgcggctgggtcgacgccgacgacgacgacgacgacgacgacgacgagggccgctgccgctgcgtctgtctctccggggccgccgagtgggtcgccgacgacgacggtcggcagcgggccgtccgtctcgcagcagcagcccccgacgcacgcctctctagccaccaccgcggcggaccaccgcccgctgccgaccctctcgccgctcgtcgcaacgacttcgacgaacgctcggtcgacgaacgccctccctccaccaacgacgacagcgaccccgatggccgcagcggtgtcgagcagaggctctctaagcgggatcaacagcgctctcgccggcctcggcctcggctcaggcccatcaacggcaccaccaccacaggcgcaggcgcaggccgccggccagacaatgtcggcgagcgccgcggcgccgggcgaaagcggcgctgttgctgcttccgctggccgaaaaacggcgttgacgacgacggtgaggggcttgggcggggcgaagctgctaccggcgccgacgacgacgacgacgacaacgacggcgacgacggggtcggcgtcggcgtcagcgtcaggggtcggtggaaggtaaagggccaggggagtttaacgggcgatgagagtcggacgactgattgattccttttccgacaccgagcgcaactcctcctctcgagcctttccaaacggagggattctgacggacggttctgactctttgccttgaagaggcggagcctgactcccacctcacccgccttgacgagcgcagactgcatggggaagaagtcggatgaggatctgagcgcagagggagcccacgcaggccgggcgcagcgcggcggaaagacgggagagagggggccggcaaagagcggctcgcggagggaaggggaccagggtgagggggacgagaaggctggaggtggcgagggcagcggcagggagggaggcgtcgagcgagggcagggaggaggtggcagaggcagaggcagcagcagagagggaaagagaagcgggagacggccgacgaccgcccaaggtcgccgccgccacgaccgagacgtcaaactcggacagcgggccgttgtacgaggccgtgccggcgatgcgcaagtcggtccggaggtgcgagccagggacgaacggctcgagcttgaccgtcgtgccggcgatcgacttgaggtgcttggcaaggagagctttgacctgctcgtgccgagcaatgcgccagagcgggcgagcgccgcagacctcgtcgtggccgaggtcattgggctgggcgcagagggcacaggcgtcgtccttgccggggcagagcgtccggacgtgtaggccggcggcgacctcggacgccgagagacggagagcagggccaaaggggatcacagcaagccagcgtcttgccaccggggaggagttgtcaaggatggtggtggcagaggacgcaggcaacgcacagagtagagcctcgcgacgggtggcgaaggcggcctggcagcgagcgcgctgggagacaatgacgggggccgcgtccgggtcggggtcgtcggccggggagagggaagcgtcgacgagaagatcggcagactcggccatggcggcccgggcgtgcggcgagcactcggcgtgcgacagtaggcccatgccaccaaggcgagcaggcagtgtcgcgaggccggcgtccgatgcaagacgacgaggcgagccgcggatgaggagcagccgctcgagcagggcgttgtcgagcgtgagccagggcgagtcaaggtcgtccgttcgaagcgagcgctgaaggtgccggaggttggcctgcaagcattggcggagcagtaggagggcctcctgaggcggcaggtcggcgagccggtcgatggccggcagctggtcggcgatgcgccggtcgaggaaggctcttttagggttagggtttaacggggcatgcgatgggagcacagggtcagaggcgctatagacggtggtacattggaggcgagaaggagttcaagtggctaaggggcttcgcctaaaaggcgaagaagcgagcagcctgctgtgggtgatgctggtcacccggcccgacctctccttcgccgtcgtccggctggcccaattcgcggcctgccctggcaagacgcactggtcagccctgaagagggtgctcgcttatctcgtcacgacgaaggaatgggccctgacctacgggcgggagaaacggatcgacgttggaggtctactcggacgcggactacgcctcggccgacatcgacggccgctgctcacacagcgcttacgtcttcatgctcaacgggggcgccatcagctgggcagccaagaagcaggagagcgtcgtactgtctacgtgcaaagcggagtacgtcgcgctggctcatgctatcaaggagacgatctggctgcggtcagtgctggcgtcgctgcggcttctccccgccggttcgacgacggtctacgaggacaacagcggcgcccggacgctcgccatgaacccgaactcgcacgctcgctcgaagcacattgacatccgtcatcacttcacgcgtgacaaggtcgaggatggcacggtcgttatcgtgtcgatgccaacgaaccagatgctggccgacttggggacgaagctcctaggtcggctgaagcgtcagttcttctcgttcggcatgggtctccgggggcacggtctcgccccttcccagccgaaaccagagggagcagaggtagcagacgatgcagctcgtcgagagggagtatggaagttgcgacgagtgcggcgcggcgcgtagagccagcggcggcagcaggcggctgcgcgcgcgcgccagcggccgcgcgcctgccgatggactcctgacgcgtggactgcatcggcattcctccttcttaagctcagcgcgcagcattgcgttctcggccgctaggcgctcgttcgtctcgtcaagacgggctcgagcgtacatgggctattcaacatgtctgaagctcgtcgttacgggcgcgcatggcgtcaatgcgctcgtcggctgggcgcaggtcgacgagccggacgattttaacctgttgagcggcgacctcgagatcgagtacgcgcttctccgcggcgccaagctgcaatttgaccgggctgaaaatcgttcgttcgtactgcggcagcatgagcgcacccggaccaaacgtgtttattccgagcagaggggaagagaagggggggggggggaggtgtcagcgccttccaaccgaagacgaggggttgagcacaaggacgaaccgccgcgatttgcctcaacgaattgccctccctccccctcagctccttctcctccttcctagaccccgccaactccgccttcacctcctccagccgccccagcagctcgccagcctggagctcatagtccgccgcgcgcgcgtcgagctcggaccgtgcaagcgccaggaggcgcgagaggtctgtggaccggcgggtggagtgggagagggcgtcgtgcaggtgcgagagggcgagggcgtcggtcgcggaggcggttgctgatgctgatgatggagaggaggagcggaggaggccgttgggcgtcggagagcggccgtggagggaggacgacgacgacgacgacgaggaggcgaaggacgatgagccttcgccagtgccctgagcgccatcagagccaatactgagcgtgtggacgtgacgcgactggccgtctctcccccgctcgtcatcctcgccatcgtcctcgccgccgccgccgccgccgccgccgccgtctttagaaacgagcgcccgcggcctaaaggccgacatgtcgcgctcaaagtccacctcggccgaccaagccgacggcgacgtcagcgaccggaggagctcgggcgcgccggaagggtagaggacgtcctggcccggagagtcactcgcagtcgagctcgagctggggggcgcgtcggccggaagcgcgaaggagggcaaatcgggctgagcagcctcctcctgctcgcctccaacggccggccggccgtcgttggccagaaggccgtcgagcgaagggaccgatgctgaggttgagcttgcgtgggatcgcagcaggccagcctcgtaggacgcttggcgggctttgcgaacgcgccggccgccgagcgcaagaggggctgggccgaggccgaagatcgtcgacgaggccgagggatgcgtcgacggccgtccttcggcgccggtggggctgagcgcgtcagcggtggtggtggaggcggcggcggcggcagcggccagcagctcgcccatcccgctctcccctccgcccatcgtcgaagaaggcggtggcagactcgctcccctggcgctcactggtcgccgccggccgccagccttccgtagcttctcgactggctcagccgaccgcccgagtgacggcgacgatgaggagtaccacgacggcgacgcatatgtggctttgctcagtcaaagctccgtctccgagacggctctcggtcggcctccttctccggtcgcctcaaagaagatccaccgccgctggccgagcttgcgatccgtcgcggatcgtgcgagcacttactcggccagcggcgatggcgagaggccgcagacgacgcgaacggtccttgtcgagcgcgtcaaggaggtccgaagccgaaaggggtggttggggtggtgatgggcacgaagctgaacgatctaacgacctttggacgtgctggctcgttgcggctctcgagatgcctagcgacggcagagcatgagcccgactgcaatggtcgagcgagcgaagcagcaagaagaaaggcaaaggcgtcatgaaatgtgtaaaaggctacagtgggcgtcgggtcgtcgtgtgtctgggagcaggagaaacggatccgagaaaaagcgatcaagaaagagcgagtgggtcgggccgtctagcgccggacggtctcgtgcgcgccggcagcagcgccagcgaggggctggccggtcgccttggcctcaccctcggccaccttggcagggttggaagtcgcctttcctacaagcttctcgaccgtgccgccaatcttctcgccaatcgtcggcttgtgggggacggcggcagagtgcgagccggtgctgcaagggagaaagaaagagggttagctgtgagttcgagaacgggaggaggaggggacggagggcgacgaagggaagaggagcgaaggaggagagagggagatgaggaaggagaaagggaagggagggcacgcactggtgcgagtcgcccgtcaggcccgagccgtgcgagtgcgtgttgtcgtgaccgaggcccgagccggtcgtgctgcgagcagagaggaggagtcgagagtcagcaatcgtgtcaaggagaggggtgagagaggggagaggagaggagaggagggagcgcactggtgcgagttgccggtgaggccggtgccggtcgtgtggtgggtgttgccgtggccgaggccggcgccagcacccccatacccatgcccctgcccatgcccatgcccatccccatgccgccgccgccaccaggcctgccagacatcatcccgcccattgcgaacccgccgccgccgccgccgcccatccctccaccgccggccatgccgactccggggccagaaggaccgccgccgccggccatgccgccggccaaagcagcaccggcgctggcataaggcttcggaacatacgttcctggcggaacgccgccgtttgaccgcccgcctccgccgccgccgccgccgatgccggcgccgtcgcgtcggtcgagagggcccgaggggccagcgccgtcgcgccctccgcgtggctgggccttcttaacctcgacctgtaggaagcgtgcgcacaatcacgccacggtgttagctctctcatcgcccgcgaaggccagaagaaggaaggaaagggggtggggagagccgacggacgcacctgctttccctcaatctccaacatccccaagcccaaagaccgctcgcagctctcctcatccgcaaacgtcacgaacccaaagcctttactccggccgctgtcgcggtcgagcatgacctgcgcgtcgagcacctggccgaactgcgagaaaaaggcgcggagcgtgtcgagcgttgtcgaagggtggaggccgccgacgaaaatttttgaggagcgccggtgctcggagtgggggattgcgcgcttggggtcgatctgaaggagtgagaaggggggaagggtgtggtcagtcgacaaccgcgagagggagagggagagggcgagggagaggagatgagaagagggagaggggatgtgaagagggagaggggatgtgaagagggagagagcgagagcgagaagaggagctcaaggggcagagggaggaggatgtcgaaggggttcggagggaggaagtcgtcggaaaaagagcctcaatcgaccgacacgcccaaaactcaccggcttgccatccagcacatgtccctccctcaagaccctatcaaccgcctccttctcgtcaaacgtcaagaaggcaaacccgcgcgaacggccagtcgcgtcgcgcatgattgtgcaggcggcaatcgggccgaagggggcaaagtgggcgcggagtttgtctgtgggcctcacccccggcacgcgcacgccccccgccagacctcttccaagtcgtccagctcgacccatcccaaactgccccggttgaagccgagcttgcaaagctccgggccgcacagcagaaggcggcgagcggtagcgcaggcaagggcgcgggccagaaggggtcgggggtcggccggacgggaggggacgagctagcggcagtgccagtaggaggaggccaggcggtcagttccccttgctctctctctccctcttgccactctcgggtcggaccttgtgtcgatgcgcacgcacgcatgcaaacacgcctcacgtccatcccgtccacctgctcgcctcatatccaggacgctgactccccgccgccctcctgtccctcgctcgtctgtccagccggcatcccataccaccgtttccccgcccgcggcgccaaagcctgcttcgctgtcttctacgccctccgatcggccttcgtccgctgcttcggagactggaccgctatcgatcccgatcaggatggtttaccctccttctcccggcgggaccttcgagccggcagcgacgccgagctcagctctgccgtcgtcggccttgcgggagggatcgacggatgcgcgaacggcggtcgacgagccgagtgctcggaaagcggcagtgccggtcgcgctcgcagatgctggaccgtcgtctccatctttgggcctcccattgccatcagctccgaagcagcagcagcagttccctccgccgactttcgccccgagctcgtccgcgcccctaggcagctcgctcgcagtcccggtccttccgcccgctcctgccgctggctcttcacctccaagcgccgtatcgcgcgccgctccttctcccgccgcgccttctgcggctgcgagcagcgtcgaagacgacctgtcaatcgaggatgcgcctcgtgggcttctggcttcttcgtcgacgtcggccggggcagacgctgcacggtcgatctttggctcgttaaccgctccgaccaaaggtcgcccgacaccagcaacaacagcggccagctcgtcccccgtgccgtcgtcgcccccgtcatcccggcccctccctaagccaacctcggcctacacgttgcaagccgccctcctcgtgcaggtccaattgccactgactggccggtccgtcaactgggagacgccagcccacggaccttcaacgtcttcctcctccaccaccaccaccaccaccaccggcgctgccgccgcctcctctgtcttcggagggcgcccgacagcgacgacactgccggcggccgggtcgtcgagctcaggctcatccggatcattcttcgccgcggtcggccgctcacgggccaggtcgcgctcgaccgaccgaaccgctgcagcagcagcggccgacgacagcctcctcgcgtcctcgtcctcatcctcatctgcggcggcggtcgcaaacgccggcaacagcagcatcagcaacagcaccaccggcagctccagtcgtcggaccttctcgatcccgctctcgcgcaccctctctggcggcaataccggccgctcttcctcctccaccctcgcttcttccccctcgtcctttggtgcctccggctggctgacgaccgcctcgagctcgctcggcaacatgttccgctcgacggcggcggctggcggcggcggcgggacggccgcgggcgcggaccatacgctttggaactcggggacgccgtttgtctttggcccttcgagcggcggtgggggaggggggctcaacggcagctcgagctcgattggcagcggcatcaccggcggagggacgacgacgacgcaatggatcgcctcggccgcgcctccacctatgctgctcgaccttagcccggcgccatccgcgggcacgtcccctcgttcgcgcatcagtcggctgccgtcgtttggcacgtctagcgccggcggaggaggaggaggaggcggaggaggggggaggccggcgtcgaaccggtcggcggattcgagcgggcggagcacgccccatgccggtggtaccgggccggggagccggctcgcactaggcggtggtctccagcagcaagcgaggcctgggacgcccgcatgcggccagcttgcgagcccaccgccgccgacgagctcgagtctgacattcgtgacgcctgttgtcgcgccccacgtccggatcgacgcgccgccttcgcctccgccgacggcgacgaccgcaggcctggccgggctctcgctcggcccggcggacggggcacgcaagtcagtttgcggttcagacgagtcagaggcgatcgccagacgcacgccgggaagctcgggccgtaggcgccttggccgtagttgccgccgccgtagcagaaataggccggccgaacggccgacatgacggcgtggttaggaaggagactccactgctgatcgggactgcaagacggggaggccagcccgtcagagcgaggtcaaagagggcgcaggcaaggcaagttacgtacccgtgaatcatacggtccatgacgtcggcctcggagatcgagtcggccgcctgctccatcagctggagctccttgagcgtccgctcgcggccaacgagggatgcggcccgcgcaaaagagtgcttcaggtagttctcctggaacaacagcaggaagggttcagcagggcggtcaaagcaaagaaggcaggcaggccagacagacctggacaaaaagcggcatgaagctgaagtcctggaagtagatctccatcttctggccgagcgtcatacggctcgtgtgcgaaaacgtgtagggcccaaagagcttgtcgacaagcgagaagggcgttgcgatcgagttcttttcgttggcggccgcgctggacgagagggggggaagggtgtcggcaatcgtcagtccgagctcgagtcgatgcagcgacccgccgcgactgacagctctttgccctcgtcaaacgtcatctcgttttttgagagcttccaggtcgagagcatgttgagcacctgccggatgtccgagtttgcgccctggatgagctggtcgacgacgttggcaggaatcttgattccctccctgcagaagagtcgacgcacgacaagggtgagcgccaatcacgagacacaaggaggaacaacaggagacctacttgaaagcgatcgacatgatgcgcgaccggatctcctggacggtcggcctgagaagggagggcgcagcacgccgtcagccggagaggcagcgacgctttgtcggcgcaaacgagcgcacgcacttgcggaagacgagcatcgcacacgtgctctggaacggcttcatcttgggcgtactcttgtcgttgcagatgaggatcattgggatctgaaacgggccccctcccttcgtcctccaggtgaccggtttctcgcccgactttgccctcgccaaccccctaggctacctcgccctctcccttttcaccctcccgctcttcttcgacccagaggtcaggacgcagtatgcgcggcgccatgccggcaagccgccagcggtcagcggggcagacgttggcttcgccgtttatgtgcgtccgttgcgttattttcgagcggacggggggagaggagagcaggcgtccggaaaagaacgaagtggccaaaaacgatcactgacgtcgtcctttccgttttcccgaatcccttctccccttaccaatcgctcatccaccaacaaccctgcccgaccctctttcctcacgctctcgcccgcccgaccccacttaaccgcaggcattcaccctctcgaccgcctgctacgcccaaacatggctctatccagcgccggaagccgtccagcgcctgtcgcggtacgttccctcccccccgctctctctgtcgcggcgattcagcgggttgcgtgcgctgctctcattggggagctggccggctggtctggcggcgagcgcgagccgcgcgaggagctttgtttgcccgccttccttgggttgcgatgagacccagctgttgaagtccagagcagggggctgggcgtcgggtcgcagagcgcagtgctgcgcaacgctctccttccccttgcggggtttcctgccctcatgggatccgcctcctcggcgcagtgagcggcagggcagctctctccttgatctgctctgctcttcgaaccccgcccgcccgctcgctcgctgataaccccctctctcgctcctccgctcccttccgtcggcgcagctacaatcggctcgccctccccttgctcgcgctcgcggtcgccggctgggggctcgtcgtttacacgagcccggccggccggctcgagacgctcgactggctctacggcttctcgtacatcaaggtcagtcggtcgtgttcgctgtgtggccagcagcccccctcggcagactatccaaaaagcgacttttgactggctatccattcacactcgactgacgaccccgccccgcccttcccccccccccccccccccccagcctttttttttttttttaatgatacggcgaccaccgagatctacacctaagccttcgtcggcagcgtcagatgtgtataagagacaggggggggggacatcagctgttgacggagagacagaagagggagcgaagggaggagcactcactctgcccaaacgcgctcgccaaactcgcgcccgccctcgctcagccggaagtacgcaatgtacctccctgccctctccggcgcctgcatctcaacggcaacctcaaacggctcgccgggccctacccaaccgactagcttctccttcccggccccctcgccaccgggagaggagagatcatcgcctcccgtccagcgcaagacggccccgggcccgaatggcactgagccagcattccgcaggcgccacgactttgtgaagcgggcgccggaggggaagacgtcgccgtcggggacggtgccgtctgcgatgaaggttgcgtgcgggacgggcggcagcgccgacggggggtcgacggccgccgtcgagggcgactcggcgtcggcggcgggccggccgcaagtgacgggtccgccgaggctgcgctcagccatctcgggcgaggcagcgacggcgacggcagcggcggcgactggcggcgcgacgtcggccgaccgggcgaactcgatcggcccctcatggcgcatcgcaatcacactccgttcggcgaacgcggcgcctgacgagagcaaagcgggcgggagcagagagggatcagggggtgtgctgcgcaaaagagcaagaatgaggcaggaggggacggaccgttgtagcgcgcgatgaaggcatcggccgaggcgggctcggcgaaggcgactgtgacgatgccgtcggcctcgccctgcaacccgtgcagcaggagggacgaaaagggcgagtcagcacaacatgctcactgtgaacgcggtagagaaaggaggaaagaggggaacgcacctcccaaacgacgacctcctgcacggccccaaaaggctcggcctcagcccgcatgtcatccgcgaggaagccggcgaggccgcggtcggttgcgagctcgaccggggtaaagaggtacttgaggacgacgacgatagcgggggcgggcgggaagcgggccgaaaggagcggtcggcgaggtttgggcggatgaggggatggggtcggagacaggtccgagaagagccgttgacaggttgcagcgtatatgaggcaagcggcgatcgaacgagcatccgaggcgacgagagaggagaatggtagaggagcaggaatcgtcgtcagtgatcgtgctcggttgacgtgcagtcaggttagccggctcggccatcgtctgcctcagcagctcccttccttggctgtccctccagaaaatcgtctgccggccgaacccgcccgcagcccgccgacaaacgagccgcgatgaaaagggagagaaaggaaggggcgacgaaccgactcgccggcctggccagcctgccacttctgcttcttgagcgtgatctcgccccgcttctcggcgccgacgcgctccgtctccttgaggccggaccggatcgcccgggccgcgacctgggtgtacttgttgtacctgcacgcgcacgagagagaggttggtcagtgtccgctcagctgcgggtctctcgaagacagcggcccggcttcagggctgcgtcgcgggcgggcagatgcgccggagcggagcaaggtcgtcgcagctcgtccggtcggtcggccggccgacgactctgccctgtggtccgcgcgcgcggccgagtattgggggacgcacgacataatgttacgccaggcagacatcttgcagcgagtagaagaaagaggaagaaggaggggagggagaggggtgtttgaggttgcgtgcgagggcgaggaggacgaggtcgagggcgagtcgtctaagtggttcgaatagatgaattctcgcgcccgcacgccgtttcggctcgccgtcatccagcagacacgccggaccatcactctcgctcgctcgctcacacagcacagcagccccttcaacgcccaagcatacccacagagccagcgacccgtcatcagagacgctcgtcctatcgctgcacacccgaacagtttcattccagccgcgctaaaggcagaccatcaccaccgccgctcgccgcccacccgcgtcgaacactcgcccagcagcccataacccggctcagcaacctaccctagcgattattgtttgaacttgcggaagcggatgtgtgtcaatatatcggccgtttgcggccgatacttgccatgatcaccggtctgggctgccggctggcggtgacgcaggccgggctgacgctggtcagcaccgcctatatcaagtcgttgcaggtggaggtgatcaagctgcatccggggctggtgcgtagcctggataagcggccggagaatcagctgtttgtcagcagtctgaccgaagcctgcaaagggacgcatgcccaggtgttcgctgcgggcgtacggacgcgcgaggagtggcagacgttactggataaaggcgtttgcggcggtcagggcgatctgttcgccgcttccgagccggtgggcaacacgctgaaaaaatattcaccgcgcacgtatgtttgatgtcaaaatccgaacaaattagcgtagaatatcggcgccatagcgttgctgaccggtttgctgaacgaggcggcgcgcacgaaaatgttagattttatgtcggtggttcacgcaattttcgagggcagcttgcgacaatccctgccgttgccagaaggatcgctgttctgcgggcattcattatcatggcaatttgcgtaaacatcattttttcaccgtagcagagccggttagcgccttgtcgctgttgcgtgtggttggtacagtaagcggatttcatttccgcccccagcttgcaggattatcctttagttatgtttaagaaatttcgtggcatgttttccaacgacttgtccatcgacctgggtaccgccaataccctgatttacgtaaaaggacaaggcattgtactgaatgagccttccgtggtggctattcgccaggatcgtgcgggttccccgaaaagcgtggccgctgtcggccatgaggccaaacagatgttgggccgtacgccgggtaatatcgccgccattcgtccgatgaaggacggcgtgatcgccgacttcttcgtcaccgaaaaaatgctgcagcacttcatcaaacaggtgcacagcaacagtttcatgcgcccgagcccgcgtgtgctggtctgtgtgccggtcagcgcgaaccaggtggaacgcagcgcgatccgggaaggcgaagggggcgcgggcggaaggggggagaccaccgtcggaggaagatggactggtcggacgacggcaaggacaagatcgacgacgacgacggccagcagcagcatgtccgagcgagcgagcgagctctcgccctacccgactctgagcctgaccagtcgttcctgcatcttgcgctgctccccttgccgaagtcctagctggctgcttgctgtttgctgccagctgctgccaacctcgcctcccgcccgcctatcagccagctagccaccccaccggccagtcgcttacagcccttccttccttcaccaagtttgaagacgcgcgctaaggaagaaacgcacctctggctcgcctcgctaaccttgacccgtggccgagcgaggtcgtccttgagccgctggttgtggtcgacgagtcggcggagcttgagctcggagacggctgcaagcgggcgggtgggtcagctaaaggaggcgctagagagaggtcgacacggactcacactgcttgtggctctttgaagacatgctgtcgctagttgatggttgagggtggacggagggaaggctgaaggtcgttcggagggacgaagccaaagggccttgccttgttcgacgcgcccgcccctgtcgccatacgcccgcctctcgaccaccatcgcagcagcagcagcagcagcaacgccatggagtcgcaagtcccgacccgcccgccaagggcacaacaacgcccgccgcctcctcctcctactttcgacgacgacgcagatccgtgggcagacgacgcgctccaaccggcagcagcagcagcagcagcagcaggagccttgagcgaggctgcacgcaccgccgacagcgacgacgacgatgccgacgacgtattcgaggacagcctggccggcccagcagccgacgactcgcccagctcaacagcgccggcaccggcgctcgcaccgctcgagacgtccccggccgacgttgacgaccgagcgtcatcctcctccgctgacgccgccgacggctcgttcgacgccgccgaccctttcgaccgacgaccacccgctgcgtcttcatcttcgccgaccggcagaggaccacgagggaaagaggatggtggtcgggagaggccaggcggtaggtcgggcgccgagagcgagcgggcgaggcgcgggcgcgaggggcggagtctgaaaacgacgaccgggcggtgtttggcgcgctagagaggagggaagggccgcttgctgggctcgagaggtccgtcgaccgagagagagaggcaggcgaagcgaagcaggggggcaggtgggtggtgagtgtgggtcaagagcaagtctcttttctctctctcccttttgaacggtccggccgagctgagtcttcctccctagggcgagaggcgtgcttacctgctgcgcactcgcatcgtcggccttggtccggcgcgatgagccaacccgctgcgttcggccgcaggcgtgcggccaaagaaaatactcgcccaagccgaaagcacccaccgccgccggcagaggagccgctgacgggggctgagacgggcccggtcatgggatgaccgcccgacccgctgccccgcacgcaagccctctcccccgcgcgctgggttcggcagggcggaccggggcaagcaaattcgacaaggggccaagaaggggccagcgaaaaaggtcgaccctcctctcctttgctctcctcctctcgctgccgggtaaggcgcgggccgggctctgctgctgggctcaggagatggtcgacgacgaagtgtgatgcgagctgctctccctgtacggacagggcgcaacagtgagggaggcagcgcaaggagctgcctccacgatgagtgtgcctgctgcgctccgccgtgccgagcccaaaaaatctgccctgctcatcacccgactcgcccgacgagcgtaaagcgaaagggccagaccggccggctctgcagccgatgctctgctgggggcggcggcggaggcgcaacacacttttctgcgcaggccgcggcggggctcgtccctccttggctcttgcgatcccgtcgcttgcctttcgaccaatagtcgctcgctatcagcggacgtatagagtcgttcagccgaccctggctcaacctcctcggtggtcggttcggcacgtccggatcgtccccgcccctctttctcgacctcgttcccgctgactgacccctcttgctcccgaaagtcgcccgtctggccaacgacgacgtccgcgatccccgccgagcctagctgcccagcgaccgacagacgcctgagcttgaacggcggctcggcgcagccgcagcagcagcccaggcggcgcaacaagccgccgcagcagcccccgcccccaccagcgtcagcgccgccatcgacgacgctcctctgcgagccctacgcgtggatttccagtccctccgtttacgcatgtacgtccctgtccttctcacgacgctttgcccacccccttgacctcaagcttgggggctgacccttctcccggcggcccgttttagcagcagcggcagcagagccggatgacgcgcccggcgtccctcggccaagtccggcctcgtcgtcgtcgtcgacacgcgacggcacttcgagctccttcgttgtcgagcgccatgctcagtcggttgcaattctgccagggtcggcacttgcgtctgtcattgagggcgacggcagtcgcgaggggctgccgactgcccctcgctccgcctccacctccttctcctccttctcctcctccgacgccgacaccgacggccccccaagtagcatcacaagctctcccgccgtttcgacccgccggacccggtcccgcgcaagctcgctcgtcgcctcgccccctccgggcctgccgacgctgctcgaagagccggacgaggaggatctgcaagggggaggagcggcggcggagaggtcggcgacgtattaatcgtcgagtgcggacgacggccggcgcctgtgccctcgtcaacttcggagtggtggctcgaatcggaacgatgccgtcaaagccttctctcggcccggcttcctcccatctccgtcggccccctcatcaacacccactcgcccccctccgtcaagactctcgctcgtcctcgacctatcacctcacccatcctcccccttttcagctcttacacacgactaccctcacgctcacactcatatacgcggccatcggtcgatcgagtctcgccttcgccctgtttgcaatctacactctcacgacccctcctctcatactctccgacttccccaactccgacccttgcacgtttctcgtcgtcctttgccaagtgcgccttgagcttctcggcccggtcgaggtactctgtaaatttcttgcggatgagctctttgagcttgtcgttcttctcgtctgtgcgccgtgtgttgggggggaggggggacgggggtcaacgagagcgcagcccagctggcagcgagcagctcgaccgacttacacttcatctgcacacgccccccccccgcgatcgtcatcaaacgtcaagagtcagcccgtccttccttatcgccggccggcgaccagaagcaaaagcaaagcccgcaagccgcgcctggcctcgctcgttctctttacccttccgaagctgctcagcccgaacgagctcgcgccctcgttcgcggccatgggagatagatcgagcgagcagacgtaccgccatcataaagtagtcgaggctgttctgatacctgccaaagaagcgaggagtgagcggcccgtcagctctcagcgaacgcgcgacaagcaagggaggaggagggaaggggaggaggggagggagaggggatcgcgatgcgccgaacccgacctgacccaaccctcccttcaacgacgaccggttcacaagcgagaagcgagaggagagagaagggggagagagaggggacgcactgcttgtaagcctcctcatactcctgcttgacatcggcgtcaatcgccttctggacaatctcgattgccttctacatggcccgggaggagcgcacggggatgggcagcgcagagaggggtcagctctcgggggcgggcgatgcaacgcggatgaggagccagccaaacgagagggagggacggacgtcgagaaagtttgtgtttgtcgacatggtgtacgatggctggctggctgtcgggagggaggaaggagaggatggcggtcttgtcgtcgcagccaagccgggccgggcgaccatctcgacgcgcgcagccaacctggcgggcgttcttccagcgagcgcacctctttccgcccaagcaagcaagcgagaaagggacacaagaaagaccagagtttcggagggcagacaagcggagagagagagagagggctcccccccttcccatccggccggtgccgccccgcaaaagcgctctcaatcctcgccgtcgcgctcgtcaaaggcgagctcaacctgctgtggtcatggaccgacggagaggacgacttgcgcgagctcgagcgccggcgccggcagcgggcgaggcgggccgtcgcgaaggctcgtgctgagacgtgcgggggtgagggcgagggtgggggagaggaggacgaggagttgctcgtcatcctcgagaaggcggacgagcagcagtccgacctcaacctcgccgttgacaaggggagcggcggcgcgttgctcaccaaccgacgagccacgccctcccccaccaccgctgctgttgccggtgaggtaaccgagcgcttcgtgcctgacacacctcgccgtgctggcctgcgctcgcggacaaagctctagaaaagagacggaacggacggaagagatcccacaggttcagcgagcgacgcggcgctcctccgcaagtaaaggtgtcaacagacctctcaccgccatccgcattcacccctcctcttcctgcaatcccacgacctccctccttcgccccgccaaaagccgctcgaccgtccggagccctagcaggacgccgtcgtccggtcctgccgcgctgccgggcgggcaagcgcgcgagtgggcaaagtcgatgagtttggcggccgttgctgggggtgggcgacgacggcgacgacgactgctgctgctgctgggggcgggtgcggcggcggttgagtcggcgttgtcgtcggtcgtcgtgtcggacgcggcgtcctcctctcccgccgtctcctccaaagcgcgccggagcgtcccttcatcgccttcataaacaaccagcaaactcatgcccacaaaccttgcctcagtcctttcgaccgcttgcctcaccttcttcgtctgctcgcccagccgatcaagcaccgcgagcaacaggtcggccgggaggcccgccgcccccggttcctccccgcctgggggtcgagcgaaggggaagaagcgtgcgatgccggatgggaggtcggcgggcgtgagggagacgccgaatgatttgggcgtggagaggaccccttcctccccctccctttcctcctcctcttcctcttccacagcaagttccgagcgcctcgagcttctctgcgaaattccctcttggtcggcagagtgctttgacggtccgtccctctctctctctctgctctctctcggcggacgctcgcgagcggtagggaggctgcgagcgcgtggggcccgggcatgcatgcgcgcgtgcttaggccgggtcgagcgttaaccggcttgaaggatgacgggcgaatgcgctcagctgacacaccctgctccttgccccctttctcccctcgttgctcccctcctcgttctcgttcggctcctcgctgcacacgcgctcgacggttcgcccgcccgccgcctcgcccgtccgccggcccttttgcttcgtccgatgtagacctcgcctcatgccaggacctccggcgccggacgcttgcggccctgcacgggatcgtcgacgacttgcgcgagcgtggcgtgcgttctccctctcttccttcctttcctttttacttaggtctagtgtgcccgtgcttgtatgcgtccgaagccgcccggtgtgtcgcttggcgcatcgcagcgtatcgcgccggattggaacggtcggcaagcaggcaggcgacccgactcgaacgcccgcactttcagactgacgtactcccgtatccccccctccgaaattcccctcccctttctccctcgctcgcccgcatgccccgtagctctcaccgaaataccgcctgcaaacctcgtcgatcggcttctcctcgatccggctttcctctcctccctcttcctccccctcttaccacccgctctcaaacccggacgcgaccgacgcctcctccgacgactacgacgagcaacagcagcgctccacaaccgcgcaacagcccgccctgcccatccccgccaggaggaactcggacgtcgtgcgcgagacgctcgagcgcgagggtcactttctcgccaacggcggtagcggcgccgctggcggaggagggcggacatttgtcctctctgggtcgaaaacaatttatggaccgacgctcgtcatgacgtgaacgacgctggcccctttacccgcgtagaccaacctcccaacctacccgacccaagacgtcaaggtccgccggcgcttccaagactttacctttctctcggatcagctcgcacgcgactttccagcttgcatcgtcccgcctctgccgagcaagtcgcggatcggtgcgtcccctcgctcgcccggcccgcctagggctgcctggccttggcttcgctggcggcgctgagactgacgcccccccctcttgcgcattccgcccgggttggagatgcagagtacctgcctgggcgggaccggttcgcgcccgagtttatcgagaagcggatcgaagagtgcgtcctgcgaggaggagcgaggggcttccacgggtcggctttgcgtgctgcgcgaaaggcggtcggtctcccttccggcacccatgaactgatccccccccccaccaccactcgccgccagtctacagcgctttctcacgcgtctaacgctccacccgatcctccggcgcgcccagctcctcatctactttctaacagctacgaccgactggccgatcaaaaagcacaagcacctcgcctcgacgacgacgccccagccatcgctgctcgacgcgctcggcgactcgttggtccatttgacgcaggggacgaaggttaggaaggtcgatgagaggtttgaggggatgagggaggaggtcgagcggttcgagtttggcctggcggggctcgagcgcgggacgggaaggctcaagggacgaacgaatggtcggtccctgccctccccctcccctctctctctctcctcttcctactggagctgacgcgccgtcgctggactgcgccggccagacctcggcaacgactatgaggaccttgcgcgctcggtccgccagcttggcctgctagaaagcggcatgacagacccgctcggccagttcgccgagcggctcgaggcgtttggcgacgtcctccagcatctggtgcggctccctcctttgccgtttcccttattgcactcggcgcttccgaacgcgctgaccccgctcttggccccccgcccagtcgtcgagctgcttttgggcgcggagcgccagaagggcgtggtgcgattgccggatagtggctgcacggggccagttggcgtgcactgccaagcgttgttctcgatccggggaagccggcgggcgatctgctctttgaggcacgagcctcagttacgcctgctcgctcgctctgccctcgctcgacgacgaccctgtcactacttctgatcacaaagaagactggaccgtgcaaaaggggcgcaattgtgaaccgaggaagggctgaaccgaggaagagggcggccagctcgggcgacgccgccgcccctccgacagcgctgtcgtcagacttcatgatgcaaggacgccgtcccccggcccttcaaagcccagagcaccgctcgtccagcgtcgcgacctctctttgctgagcgagagaaccgacagctgtcagacgatcgggatccttgcttacaggccctgagttacggcctcgaaggcggcgagccaagggagcgctgcgagcgaagtctctcaacgcgtgggcggcggcgaagtgcacgaccatccggcccgtgcaggacccgacccgacccgcctccgaccctggtcccctggccgaacgcctccatttctcgatcctctccacccaggcctctggcctggcccagagtcaggtgcaccgtgcccgagccgggtcagccgcagagctgggtgcagcgaggtcttgggtgccgggacggctgctggcgagcagctgcgagcgaggcaaggctacctgctggtcgagccagcaggtcgtcgaccgctgcgtcggtcggacgccgtcgggcgaggggccatcgcgtcggacgaggaagccgtgggcttgagagccaacttgctgctgcgtttcccgtcgtcgtcgcgctgcttgacccacgcgcgagcgcgaagcgaaagccaggtccggccgcgtgcgtgcgggcgggcaggcactgccgccgccgccgccgccgatgcgagcaagaggcagcaagtcggtcgagacgagagctcttcgaaagcacggccacagctagcagaccctccttcccttcctccttctcgtagcattctcgcgtccctctcgagcgacagccagacaccctccttctcctcaccggtgactctagcgcctccgcttcagctggctcgcgcatggccctgcccccgccgccacaagcgccgcctctgatgaccgccccagcgcggcacgacgtcccgctcgtccctgcgcccgctgccgccgtcgcccggcccgcgagcccgaaacgctcggcgctaagcccggtcgtccacacgagcgacagcctcgcgcggcgaatggccgaggtcgaggatgaggaggagcggaggctcgctgaaaacgtcttcatgtgacgatagggtttccgtcacacgcgttttggattcccctcaccttctacttcacactcctctggcccgccttctctcctatctcttccttgggcatcctgcttcgtccgtttactcttccctgcgccctcccgcagtcacgatctctcatgacccctcactcgcccctcaccggaaagagacacagcatgaagcgaggcatgccacccttcagttgccgccccatcctcctcctccgccgccgccgccccagccgcccggctgctgctgttgaggtggaggcgcaccgccgtacccccctgcacccggcgccggagcgccatacctcccacctccaccgcccccatacccgccattcgagtattcgccgtaccctcccgacgcgcctcccgcgggcgccgacgctgctgctggtgctcctaccggtggtggcgggttggtcgccgactcgtacgggtttgcaggcgcggcagcggcgggctgctgctcgtcggccgctgctggagccgtgccgtacttttggtcgaggtcgttaacgaggtctccaagcttcttctggagcagctcgagaccctgcaaaaacatcgcgcacgggggggaagggggaggacgtcagctcgatcaaaccgccagtcgagtcaagagaaagggcagaaacggacccgttcgagcacgtcgagcacctcgaccgagccagtcccctccgtctccatgtaaaatgtgtctgcctctttgaggaagtcgaacggcgcgtcgggctcgggcgccgggtcaaaatggacgtggttgtccgagatcttccactctttggcggctgcgaagggtggagggggagtaagggcgcccgtccttccctcgctctcgcttgagcccgacggggtcgaggccgagggctcctcgctcgggtcagacgagctgcgcgacgtgcctggtctcggacaggtgctcgtctccccctccaggtcagtctcttcccccccccgcgtcgcgcgtacgcaaacctgacccaacccgccctcctcgccgacgtaaaaccgcagtcgcgagctctatacgagcttgacatcgcccccggcgtcgttgacgccgctcgactggacgcgttcgcgcgtccgacgcgcacatctcatctcgctcggcgtaccggtgaacctcgacgaggtgcgtcacccccttcccccgtcctctagtcacctttccaacagcgctccaaagcgagaacccgaatcgtgctgagcgcactcacacgcgcgtccttcctccgctgtgctgctgcaggtcgcctcggcacgtgcgccgtcgctccctcctctgcgtatcatcactgccccgcctgctcgaccaacctctaccccacccgtcgaccgtggcaccggcagcagcagcagcggcgggcctaaacggtccaacacgctcagcagcaacggctcgtcccttgtcccccgccgccgcgcaggcccaaaccaagccgtccgctcaggctccgcaacgccccgctctcccggggccgggccggcgccagacgtcgaccttggagcgcgcgggaggaaggagaagacgtatgggctcggtccgaggccttcggtcgatttcgaactggcgaaagagctcgtcgatcatccacctggtccgtccctctcctcctcctccccccccaaagcccctccttcttccatcagactcgtcccgcgcactgacgcttgacgcgttcctccatcgctcggcgagacagacaccttgtccctcctcccgcccgaatcccttgcggcccttcacgcctcgctccaacagacctcggcccaactctcggtccggctcgcatatctcgtccagctccgcgacgcccagcagaacgaggcgctcgtgtcaaacgggatgattggcgagctcgtggcgaatgcgcagagaggtgctgctggtgggggaggtacgtctttcactctctcgcttaagggaaagaagtgcgctggagctgacgctgtttgcgccctttcttgcgacacacacaggccgggggatggaccgcgcccgcggcggcggcggaggagggccatcacgaggcagcgggcggggtggcgggcccggaggaccgtcgcgcggccgcggccagtagtagaacacgacgttgcgaagaaggatgaccttttttacgtgctgagagtgggacggggcgcggtcagacatgctactgctgctgctgcgggtcgggccgggcggaaagcgatcgacggcgcgggatgacgctgcgagatgaaagcagcagcgccagccagcgagcgacgaccagctaagggcgaacgccaagaacgacagacaaccagcaacagcagcaacagcagcagcagcaacaacaacaacagcagcaacaccagccggccagtcgtcacgccgctctacctgctcatggcctgaatggccgccctgcgtctgctcgccctccgccgccgtcgacccgccggcccgccctttgccttcccttaccctcacacgatgcaccgcccgtccttcctccgctcctcttcctccaagccaccccctggcgcggacccatcccgcggcccacccgacgcaggcgactcgccctccggcccacgcctctcgcacgcgctcgaccctccgccttcaacccgcgcgacgctcaccgccaacctctcaaagggcttcgccgccgtcgctggcacggctgcgaccgtcggaggcaacgtcgggtggtatgcgaaaaaggctgtcaggggcgaggcgacggcttttggcggcgacgagggcggctggcgggattcgattggagggtgggtcgggaggaagcgcagtgcgtgcctgcttctctctccttggcggcggcgatctctctctctctcttgcggacctggctgacgatcctgcatacggtacgctcgccctgctctccaggtaactcttggataggcaaagacaagctcctcatcttcccaggctgggctgtccagcgtccgctgcctctcgaaggccaaccaccgaccaactaccacgacgctcttccttcaacactcccactcgtcgtggtgacctcccctcgacccatccagcgctggaaagggtgccggcggccaagagccagcagacccggaggaactgggcggtcgagctgacccaggagactgactgggccccctccagagcctgcggctgaccaaggtcgacccgagcgaggtcgaacgaggtcgatggcgcgccctccaagtcgcaagggcctgcccaggtgtccggctcgggcagaacaaagtcggagcggccagagcgactcttcaagaccatggtacgtccgtcttgcgtccggatgggctgaattgcgtcgtcgtctggagcgatcttggaggccttggggccgggctcgcggccgcgggcgcgaggggcgggcttcgctggcggctctggcgggccgggcgacgacttcttatcgtctgatactcccactgctcggccgactgtcacggagagcgtccgaggggtggccatgctgaccagcggcggaggccgagcgagctgaccgacgaccgagttgacgaacaacgcgcgggccgagaccgggccctgtaggccgccgctggggcggagccgctcgaacgtctcgcggggcaaagccttggtgagtaagtcagcgggcatggcatgcgtgctgacccagtccaggtcgagcacaccctcccggtagaggtcgcgcgcatacttgtacgcgacgtcgatgtgcttcgacccgtgatggagctcgccgcttttgactgaggcgatggcgccctggttgtcggaccaggcggcaaccgacggggtctggtagccgagctgaccgaggaaggcccgcagccagatgacctgcgacgcgcccttggagagggcaacgtactcggactcccaagaggacttggtgatggcgttgatcctcttgctcttccagtagacgagcgagccgaaggcaaagacgaggacgcctgtgactgacttgcggctgtccttgtcaccggcgtggtccgagtcggtgaagagctcgagcgcgggccggtcagtctggccgccgagtgtgagggcgaaggcccgacacggtccaccagcaggagatccacgagacggtcatcgcgcccgaggtgaccaaggaggtcaaggccgagatgccagcagcgcaggccaagctgctcgacggcctcaagtcggcccacaaggacacccggacgatgggtgagacgatcaagacggcctcgaccctcggcgcgaccgtccaggagcacgtcgtccaccacgtccacgagcatgtcacgccgtacgtcgcctcttttctgtcgccgctttctcgtctttctccttctgacaaacggctgacgactcttctgatccgatcatagtgtcatccagcgcgaggttcatactcacaaggtgcgtgtttcccctgcccttatcagcgacgcgaggcctgtctttgacgcctgaccctccgacgcgtgccatcagacggtccatgtcgtcgtccccgttcacgaagtcatccactctgagcccatcatccacgagtcgaccgtccttccgacgctgtcgctcgccgagtttcagaagaagctctcgctctcgggctcgaccgacgccaacgaccgcgagagcagccacggtgcccactctgctcaccacacgaccaagacgtttgagggcgagccgaaggcgcccggccaggtcaagacgggcggactcgtccacgagaatggcattgctgtcctccacggcaaggatgccgcgccgtcggctaaggagtcggcagctggcgccgccaacccggccgcccggtcgtccgcctcgcaggccatctagaaaaggcttgctctcttacttaagcaacgactgtttgtagccctagtccttatgcacgcacgatgatcatgcctgttttgtacgcactgcctgtccacctcggagcgggcggacgcattgggcgaaggcggccgcgcgggcctgcagacgctcagccgaaatcggcactaagtcctcttgcagaggagcctgagatgggcactggaaggagtcggccgacgagaagaaaagcgcctgccgtgggatagtcatctaatctgcgaaaggggctgctcaaattcgactcgaggtgacgatgcgcttgagggggtcagcccgaagagtaaggggttgcgagcaggcggacggaccgagcaggaggccgacgttgtcccaagagccggcgagcgagagcggggcgatacgggcgttccagacgcggctgatgacggctgcgggcgtcgaggtcggtaggacgggcatgctggagaagagggatgagatgatggtcgggcgcgagagagtgaccgagagcggcttgcgaccacgacgtcgacccggagagggatgcgactcactcgacccaccctcggtcggtcagccaaggagggtaggctgatgaagagcagctcggacccctggccagccaacgctattcaagctaatccacctaagggggcaagagtggttgtctgacacgctcctgtcgacgctcgacggccggatcactcgactgtccttctcctctcgaccctccttctcttccaggtctcaaccgatggtggctcgtcgcacacacgctattcaacacgctcagcctctagctctgatcagcttctcgctgacgcagactgttggtcaagggtcagcgctcgacggtctgtccggtcggtcggagctgacctccttactcccccccctctgtctcccctgggctgcgcttgccttcaccctcctactcgatccggccttttccctcctgaaggaaggctaagcatcacaaggggcgctcaactcttgcttgagaaggctagcatgtcgtccctccttccctctctcactgtcatccaacccctcgcccacacgcgtgttgtcgtcccgctaagatggactcccgcttccgaccgcctcttcttccccctgctcgagacgcgctcgccgcacctcccgtcgccccggcccggctcgcttctcaagcttcccaccaccacaggccagacctccccgccggcggcggccctccacgagcctcactcccggcgctcacggacgctcgctggcgcacgtcgacgacgacgacggcgcacgacaacgacgacggcccgctccttcggccagcagccgccaacgatccacagacccgtcccctccccccggcagcagcagcagcagccccccccccccggtcgcaaaacggtgattgggcggcctgcatcgcatccctgggctacgtcaacgctgacccctgctgacttcttcgctcaccctcctgctgacccgctggctgacccgctccgatcccgcttgctgacatcgagacggtagaaagtaagggcaagagagcatgcggatacgaagcagcggaagggagggggggggcggtcgttaagaaggagagcaagcggaacaaaggaaggaggggcaaagtcgaaagtgatcgtggagggggcgtctagtaatctaccacccgtcgtctccccagcggtcgtcgttctccatttcggttccaaacatcgtcttaggcgccggaggggtcagtggcgggctgggtgccttctgaaacttcggccgcggtggcgtgtccagaacgagccacgccggccagccggccgttggcttgtgcgtcggctcggcgaagagcggctcgacgaccggccgcacgggctcccgggcgtttttgcgcggggtcatgggggcgagcggcgcggtcgtggttgaccaagggatgggctcggtcgaagtagaggcggaggccgacgtcgaggtcgaggccgtcgaagggccgtcggccacgaaggtgttctgaggagcggcgatgacggccggctcgacgacggtctcgacgctaacgagcatggcctcgacgacgacagtctctgcggcttcggcgaccggcgcggtctcggcgatgacagtctcggtagggatggcggccggggcagtcttctcgtcgtcgctggccttgacgtccgagtcgacactcatgtcggaaccggcgaccgaggccggcttcttgaccgaggcattcttgaagatgccagtctcgacaaccatgttggacatgaagacgtcgttggcggccgagaactcctcctcaacggtcccgacagcttcaacgacgacagcagcctcaactacgacggcggccgcctctacaactgcggctccgacggcgaccggcttctcgcggacgacatcgctgacctgctgctgaagcgcgacgacaatagccttgagtcagttagggaggaagagaagggcagggaagaggaggggagggacggacaggggttctggaggtacgagttggcgagcgggtcatcgagaatgagggtgaagggccgctcggcgttcatgacctgcatgggcaagaagcagcaagtcagcgagtcagctcacgagtgcctcgcccttccgagagagcgaagagggacgaaccgccttgagcccaacgaggaacttctcaaacccgcccatctccacctcctcccctccgcccgctcctccgcccttccgcgaatcgcctcctcccccagcgccgcctgacgcaaacaccttgtcgttaagctcgttgtagacctgggtgaggatgccctcgagcgtcgtgaagcggccgccgagcgtgccgggctggaggacgaggtcaatctcagggatctcaaggccacacgtctcggactgcgattcgaagagagagaccgggagcgatcagtgaaccgtaaggcgacggaagcgcacttgagggcgcggggcaacggaccttgagcaggtcgcgcgtcaggtcctcggcgtcctcgaccgcgaggacaatcttcttgccctgggccgagacggcgccgcctgacttgacctcgttgtccttgtagccgcacgactggcagttggtcgacatgatgatgatgtcctgtgaccggggcgcacgcatggaggtcaacctcggccgaaagcgcgggcaagcagagagaggagggacgcacctggaagtaaggaatgttgaccttcttcatgagcgtgtcgagcgcgcccccgcagctcgagcacgtgctaggaaaactgtagacctcttcattctcgaaccgcccctcgccggcgtcgacgtaggccgcgtcggcgtcgacgggcaggtcctggtcgcgcggggcgatcaggccgaggccctcgtcctgcgcgcgagagcggacgtaggtccgcaaggaccatttcgggtcagagatggtttcgtggaaggcggcgaacgagttgccggacggatcgtcgagcgtcaacgtgaacggcacgaaagcggcgggggcggcggggagcgaaaagagagaggaggaaagagtccggcggactccagggcgtggcgcccgggtggccgctgggccatcgtcaggcgctggcggcgcgcccaggttcccgcgctgcgcccagccggtgccggcgcagcaacaccttcaacacctccccgcgacctctgtatcatcgccgcccggcgagacgcagcaggtcgccgtatcgatggtgtgctggcgcagcaagaggttttgtcagaccgtcggccggaatctggtcggtcgatacgtaggtgattttgaagtggccgcgttcgacgcgctgtcggatccagtggtagatgacgtcgatgtgcttggtgcgcgggtggtgcagcgggttacgcgcgagcgcgtttgccccttggttgtcgccgtaaagctcgagcacctcatcgtcctggctcgcgccgccaatcgggaccgagccgtccatcctgatgcctagctccttgaagaggcctttgaaccatgacgcctccttgcctgtctctccgagcgccatatactcggcctcggtgctggagcgagcgatggtggcctgcttacgagactgccaggagaccgggccgccgccgagcgtaaagacgtaacccgtgaccgagctccggtcgcccgcgtcgtttgcccagtcggcgtccgagaagcccttaagacctttacctccctcgtacaccaacctcacagccggcgcaccccgtaagtacctcagtactcccttcagggcggccatgtgcgccgctccaggatgggcctggaagcgggagagatagttaacggcctgggtgatgtcgggcctcgtcatgaccgacaggtagttgacggagcccaacagggactggtaagtcgtcacttcggccggcggaagccggtcgggcgaggcggcgtcgagggcgggcaagctggtcttggccgggagcggcaccttgtttggcttggactctgacatgccccatcgttcgagcagctccttgaccttgtgctcctggccgacctcgatccgccgccgggcccggtctcgctcgaccttcaagccgatcagacggcagctgccacgagctctgttcacgccagatgtcacaacgaacctcgtgtcagtctcggtcttgactcgacgacaaggggcacgctgcgttctgacgagcgacggcgcgatgatcgagaaggacggacgcaccatcatgacggcctcgcaccgcggcccctcgattctgctcgacgcaaaggctgtcccggcgcccctgcacgttgccttcgcggccgtcgccgcgcctctcgagacatggcatcgcaggctgaaccatctcagcttggatgccgtgaggaaaatggcgacgggcgctgcaaaggacgtgcggttgacgagtacgacggcctgcggaggtgtctgcgaggcgtgtcaactcggcaagctgcatcggtcgcccttcccgagctccgaccgcaagtccaagtacccactagagcttgtacacagcgacgtagttgggcctgtcaggcctgagacgaggtcaggaaagcggtacatcgtcaccttcatcgacgactacagccggaaggcgtggacgtacctcgtacgcgagaagtcagagacgtttgaggcgttcaaggcgtttcgtacatcggcagagaagcaatctggacgattggtcaaggcactgcagtcagacaacggcggcgagtacactagcacggccttccagacgtacttgaaggagaccggcatccaacgacgcttgacggtcccgtactcgccgcagtcgaatggcgtggccgagcggttcaatcggacgctgatggaagccgtacgctgcatactgaaggcttcagccctgcctaacagcttatggggcgaggcggtaatgaacgcgacgtacgtcttggctagggtaccgcatcgagccctcgggggcacgtcgcctcacgagaagtggtttggccagacgccgtcggtcggccacctacggccgttcggatgcgtggcctatgcctgggtcccgtcggagaagcggacgaagctggacgacgtcagccgacggtgcctcctcctcggatacgcaacggacgcacgagcctggcgcctgtacgatccgacggcggggggggagggatgagggtgaagcggtcaggaaaggcttaagggaataggcgacaggctcctcagcaggcaggggagcgcaccgtctgctccgggtcgggtgcgagatcgccgccgggcggctcttgaaagcggaagagcgagtagccgtttgcccacgtcgacgggtcgggcaggatgtcgaacgtctagcgcagaaaggcggggggggaaggggcgaaggcgagctgtcaatttcaggcatcaaggtcgggtcagacggcacatcgcccgaacgcgccaactgacctcgacgacatgcagctttggcttgccagggaacttgagctcatcgacggccgagcgcgccaagtcgtcaaacgagcgctcaatcagccgatgctgcgcctcggtcgagcagtcgactttctccggcctgcgccgctgcgtcggcaggagcttcgccttcttcgccccccctcggccgccagcgccgccgccgccggtcgaggagccgtctcgcgagcggtcgatgccgaggtcgtcgcgctggcttgcgcggagctcgccagccgtgcccttggcgttcagcagccagttgttggccggctcgcgcgcgttggcggccgcggcgagcgagggcgggccgttggcaccaccggcagaggacgaggcggacggaggagggaggtcgggccggggcggcatcaggagctcggcgtcggccgcggacagcgtcggcggcgggccggtcgggttgagctctgggagagcggggcaagaagaagcggtgtcagcaatgtagtcgtgtctgacgcaggaagctgctctctcatgaagaccctctcttaaaccgggaagcttcaagacaagagcgagaggaggcgagctagacgcacctttgaagtcgccctcccagacggccggccagtcgagcagatcgaccggtaggccacactcgccgtcgaccatcatcggcagcggctgaccgcggctgacgctcgccgagtcggcaaagctcgcgaagcgcccgaggtcggtcgggaggacgagcagcttgggcgggcagggcggcggatggtgtgaagaagttttttgacgacctgacccgctaacctccccaaaagcctgcccgtgggcaggcctgggtaaaaatagggtgcgttgaagatatgcgagcacctgtaaagtggcggggatcactcccataagcgctaacttaagggttgaaccatctgaagaatgcgacgcctcggtgcctcgttaagacgatgcctcgcgttcttcaattgcgttttgtaggctgtcagggatactgtcccacgaatggccacctgtaagctccagatgaccatttttgttattctccacaacgagttagttcttcttttcggatccggcacttctgggggggaaatccagcgatggctggattatgtcgtcaattaaaaatgcggcgagtagattagcaaatatccacgctttcgcgagttcaggttcctttgcacgcaaagcatccaggtgcagcaaacttttgagccgcttaaaagccagttcaatttgccatcgcagacggtaacaatcagccacttgctctgctgaatattcatcttccggtaatgatgttagcaatagcacatggcccgctgcttccagcgtttccgcctgaactactcgtccttttcgacgattctcgctgagcagtcgggttttactgattaatgctttttcgggaggaagtgatacggcaatgagacgtgccggaaagggagctccggcttttttattacctgaattgcctatcattacagtggtttcaccgttcttaccgcaatccagcccgcgcagaaaacccatcatgtcaaagcgcattccttctgcagttaaccagcgcaatcctcgccagtgaacccggacgatataatcagcttctccaaaagcaagtgagcggatacattcgggacgcgaaccgaatccccggtcagcaatgcgtatctcgtatgccgtcttctgcttgaaaaaaaaaaaatcagaacggcagctcatggtttgagcaaaacgaggataatgctagacattgatgaaatgtgagctgtgtgacgagggtacagcgctgatcgcgtagagcgcggcgtaagcaacggcgaatagaggaacggcagatcgtcagcgaactcggtcatggcgagtaggcaacaggcagagggctcggctccttcgagctcgagagctcggacgtacgggtgcagggcaggcgggctgacggcggtcgaagggagggaggtcgggctgctggcggaggtcgaaggcggcggatcggggagctgaaagaaggcgaccggttagcgtacaagcgcttcctggagcgctgagcgacctgtcctggacgaaccgaagaagggcgagacgggatttgagggtgagctggtcgagcagggccaggaggggcacggggcacgaggcacgggcggtaaccctaagtcctcgaggcgggcatgctcggctgacccgctcgccgtcgctcttcctcctcctcgcctcctcctctctcctccatctacttccttcctatccaaaactcgctcagcaatccaaacaatgacctacgcctccgtcgctgccgaccacgccccgccgccgtctgagcaggtccgtcccgcctccctctcccccttctcacgctcgcaatctcgcgcacctcgctgcccgcccgctccgatcgctgacgactcgcccgctctcgcatccgtccttcctctatcgaaacgcagcctcagcccgaccagggcctgctcgagggccacctcgacacggccgaggcccacaacccggccgtacccgacggtaccggcgtccaggtcgtcccggctgacttcaaggaggtgcgtcgcttttgtccgccgtcatcagcacagcggccctctttctgccgagccgttcgccctgctttcggacggatgagcaatggggcggcttcggccctcgtgcttcttggtccgatagcactccgagaccagccctttctcttgacgagcgtgccattttgatcaaccccgacgacctggactgaccgcttttctactcgccctcgttccttctttcaacccggctcgttttcttctcaagactatggaggtccgttttcaacccccttacgctccgcttcccaacccgaggggaggaggcggggcgagacggaccgaggaagaggccgaggaaggttgtagggatcgcgacgagcagctctgcacgcttgcgataccttccgcgtccagttccattaacagacagcagggcagggggtcgtgtcagctcgacgtgtgctcgggtcggtcgcggggacaagcaggagggacgacgcacttgcgcttcgccaagtaaccctcccacgtcagccgctcaaacgcgccctcgccgaccgtctcggggagcgtcttctcgcctgccgacctagtgctgaagggccggcgctggagctggaggttgctgaggaggggtgagcagcggcggggggagatggtctgctggccggcggaggaggagaagggcggcggcggccgacggccttggagggcgctagcgagggtgggcgatgacgggccggcgaagaagaggagggcgctatgcgacgtctgccgagcgaatgttgtgcggaggagggacatggtgcgatggtcggtgtgagggtcgggagggaggtcatcctgcaaccattaccttctcctcctcttcaccatgtctcctagcccgacagcaaagctgcctccgtccgtcccactctccgcctgctctactcacgctctcgcgcctgactaactcctccactcctgccggctcatccccccggccagcccatcgccctcgccgccccctcccgcggcgcccacggcgtgcctcgcctgcgccgaccggcccatcgcctaccgctcgccgacgtgccggcatccgtcgctctgcaagacctgtgcgatgcgccaggctacgggcggcaagtgcaaggttccgtccctcccttgccctttatcactttctcgcttgggacgcccaaaccgcgaggcgaccggtcgtgctcgagtcgacgctgacgccaaatcgctctcgtgtgcctctggtccccccccccaacccaggtgtgcggcgagctcttcagcgagctgcagcgcatctgacgcaccgagccgaaacctcctgctgctactgctgcctgctgcccccttcatttttcgtgcgcggaaggaaggcgctgacgaacgtgctgcccccccaccgattcgctctcgcgcagtcttcgtcgtcggccacacggtctgcggaggctgcaaggctgcttggggcgcggatgagaaggcggccgaggatgtgcgttccccttctcgcttccggtcgactgaggagaaccaaaggttgctgactcctccgctcggccgcccgctctgtcggcaggactcgaccccgctctcgcgcttcatcggccccctgatcgccctccgccactcgctccccgccgcgcccgccgacagcagcagcagcgcggcctcgaccgtccagacgctgatcgaggccaacgttctgctctcggttggccggatcgccgactcgccgacggttcgtgcaaactgggcgctcaagggcgtcaagggcgtccaggtccatgggctcatctacgagctcgcgaccggcaagcttcgcgacttgggcgtcagtcggattccggccgggagcgagacggaccaggcgatcgtcgacgaggtgtgcgcctaggcgcaatgggccaggtgcccgcttcctctcctctttccttagacgttcttcttgctttcctccctttggcccttagctcctgctcgttcctcccactccccgcctctctctcgctcggagccggccgctcctgcctcccgagacgacacggcccctagaccgaggtgtccctcctgctttcctcttgctcctctctcttttgtatcgcccacagcgagccaagagcctttgctctgttcgttctactcgtctctcgaatgtgccttgttgaacgcggttgacaggcgaaggggcctctcgccgccgccgccgcgcgcgccgctcgaccgtcatctcgtcctccccccttcgtctctcccccttcccgaccgccgaccatggcgtcctccaagaaggtgtacgtccgattggagagagcagggaggacctgcctcgtcgttttcagggctgacagcctcccctccccccttcccccttagcgacccaccctcactctcccacccctcacctaagcccatcctcctcctagctgatagattctccctctcctcgtccagcaccattggcgagccgctcccgctcccggcgcggacggcaaggagcgacctgaccctctgcgcgcggacgatgagccggcgaaggctcagctcggcgtcctgctggcggacaaggcgggttgacgggcgacgtgcgcccgtcgcgctcaccggaggcggcagcgtgagggtctggaggagccagcttgagggcgagctgcttggggagaggggggagcgagccgacgcggggctgctggcggtggtaggcgatcgggtgcctgagtgttgtcgatcggccgcggatgggagggtgagcctgctagtcggcagctgagagtggacccattgtctgacgttgatggttgaccgtggagtgatcgtgggccggggcgctgttggtggcctggcgagagagctgggctgagccgacgcagcagcgtcaaaggatgaggcttgcgtgcgtcggccagcagaacccgcgtcggcgattgaagcaggctcgaaccagtgatggaagtgggctgagatgcttgaggggtgagaaagctcgagggaagagtcttcattggcgtggaaggcggatgaaggggggagttcgaaccgaggcaactgacgggctgccgtcggtggcatcgggaagcgttcaagcgtcgacgcccggacgtcgaggacaggcgctggagactttggaagaccgtcacagggcggctgggtagacatcgctcagctggtgacggtggatgtctgcttgatggcggtcgtgggttgaggcgagagcttgtcgacgcgtctgaatcaggagaaaaggggcaggctagggcaggcacagctcgcaggcacaggcaccctcgaacagctgccagttgtccctctgtcctctcagtgctcctctgcgcttgctcacccggccaagaactctcttccccttctactcgaggcgcgctttggaagatcatgcctgcaggcccctcccgcccccctcaatcccgcgcacgccccatccgtccctcatttgcttgaccgccccggcgatccaggcgcccgcaaagcaggcaaacgagaaaaggacgttgatgaccgggtgaaggtcgggcttcgtcgatgggggcgggacgaggagctcaaagaggtggaggaggcagatcgaggcgtagatagtctagccgggtggcggcggagggcgtcagatggccggctgggcgaatgcaggcttgcaaaggaggacgtacgagcgagcaccagaagagcgtgtcggagatgggcgtccctgacgcaggggacgaccgccggcgtcgggcggtccaccacgtgaagccgccgatagcccacgtccagagggccgagaggacgacataagggatcgcgaggccgtcgcgcttgagcaggggccacatgctgcgatagacgggcaggggggtgggcgtcagaggtcgtgtcggtcgtgacgaagccatgggtgagtttggaaggcaggagacgcacctgaaaacggcgacgttctgccagaggacgagccagccgagccgctcgtggctgagcgagcgggcgccgtcggccgggctgctcgcggcgagcatgacacccaggagcgggaggaggatggcttctggcggggcggagcaaggcgggcaacagggtgtcggtaagccgggcagaggggagctgcagaaggaaggcagaggggacgcactctcgtgcacctgaaacgcgcaaaggaagaagctcagcgcgctctgctccaaaagccccggcaacaacctccccatccgctcggccgtccaagactcctcccccgcaggcatctggtgcgcgacgagcaggaggttggcggccgagggcacgagggcgagggcggtgagggcgagggcgagcggggggaggatcgatgcggggaggaggagccgccatttgacgaggacgttgctcgcgcactggccggccggcagaggagggtccgtcagcacccagacgcgccaagccaaaaaagtataggcaagcgaggagggggtagggaagaacgcacatcgtaggcttcgcctctggtagggtcgacagctggaagctcgacacgggcagggcgtcctcggggttataaagcaggagcttcttgatgaggagcatcccgacaaaggcctttggctggccgggcttgtggacgggcacgcgcgagaagccggtcaggctttgtcccgggggtgggggttcaggagggggtgtcaggatagacaagcaacgcgacgccgacagcgacaagaaggggtgggtggtgtgggaccgcacagaatcttgtcaatcatctcgtgatcgagcaccgtatccgtcgcgaccgtcatgacgtcgccaatgaccgtcatgatctcgccggccggtgtcgcatttagcgagaggacgccgttgaggatcgtgatttcgtcgtcgcggagaggctcttcgccgtgcttgtggaaggcgagaaacgatttcagctcggccttcttgtaagtgtgttcttcgttggcgccgaggatgtagtcgagcagcttggcgatcggccatgcaacgggctgcgttcgggcgggcggaaggttcagcctcgcgtgcctcttctcgagggaggaacgagagcgggagaaaagggggggaggcttaccgcgaagaggtacatcatgagcaggacgaacgggctcgagtaggcgccgatcgcgagcccgtagcggacgccaagcgactgggggatgatttcgccaaagacaacgatgaggagggtcgaagcgacgacggcttcggccccgccgccgaggaccgagtcgaggaagattgggagcgactcgttgacgatctttgccgtgccgcgagaaagagcgagaaagaggagaggagagaagggttagcgggcggaagacggtcgagcgactgtgagcgagcgacgatgagcccgcccactcttgggtgcccgcacactcttgggtggaggcttgaaaggcggttaaagggcagagcctaagtcgctcgcccttttctcctctcctccctcctcctcctccccccccacaccaacgctgccgccgccgcctcgaacgttgtcgccgcctcgcaggcctcggtcgcttcggtgtccaaggcttcggccgcttccgtcgcttccgtcgcttccaacgccgctgccgcctccaacgccgctgccgcctccaacgccgctgccgcctccaacgccgccgtcgcctctaacgccgctgccgttgcctccacggcctcggtcgcctctgttgcctcggttgcctcggtcgcctccaacgccgctgttgcctcgaacgctgccgtcgcttcgaacgccgctgccgcctcgaaggcttccgtcgcttcggtcgccgccgctgcgtccaacgccgccgccgcctccaacgccgccgctgcttccaacgctgctgctgccgcctcgcaggcctcggtcgcctcggtctcgcaggcgtctatcgcttcggtctccaagacgtcggccgccgccgccgccggcccctccgctgctggcatcgtctctggtcccgtcacctcgggctgggtcctcgcctcgacctcgctcgtctctgacctcgtccagtccggcacccgtgtcctgaccggctcgcagggctcggacgagactcgcatgtcggctgccttctgcactaacgagtgcgcaacccgcggcttcgcccttgccggcctcgagaacggctccgagtgtgcgttcttctcccttctctctctcgctattgtggccaggctgctgactttgtcccacttgcgttttctcaggcttctgcggcaactcactcgtcaacggcggctcgctcagcacgacgaccaccaacgcgcccaagctctgccccaacagccagaccctcacctgcggcggcgctgctggcctccagctctaccgcaactcggccctcctcgacgccgccttgaatgtcatccctggttcgggctcgcccgctcctgccgccacgacctcggtctcggccgctgctccggctgcctctggcggcgccccttcgactggaagcggcttcgtcaacggcgcctgcatcgccgagaccgttggcgcagacgagcgagatcgagaggttgacaattttggtgaagaaggcgatgccgttttcaaaaaagtggttggcgaccttcatcacgcccgactcgtgctggaggatggcgagctcgggcgaggccgcaaactcgctcgcgccgtcgagaaagcagtcgagcgggacgcgcgtgtccgagtcgatgataaggatgagctcgccgacccggatgttgccctcggcccaggtcgacagcgtccgcgtcacgtcgggcgccttctcgcgttcggccgcgtgcttggccgccagtgccttgcgggccgaccgaccccgccagccggtcgggatcggcttctcgccaccctcgtcctcaccttcggcctcggccttgacggcgaccaccggcgacggtgaccagtccttgacgacgacctccttggccgtcatggcgagcgcggccgcgagacactcggcgtagagcgcgtcctcctggtcggcgtcccaggcgggtccctcggccgtgacggccggccggccgaggttcatcagcttctcgacctggatcgagagctcgagcgcgtggttcatgttggacgccttcttgaagcggccggcccggtgaaaatgctcggaatgcggcggccgggcgacaaaggcaatcgagttttcgtcgtagaacgtcttgcgctcgcgcaaggcctcggcgcccaggctctgcatgccgtcgtcgttgacaaagatcgaggccgtcccgccctggagctcatacgtcttcatcgccgcctgaaggctttcgaccgtcggttggatgacgccctcgagtgactccttgtagacgggcatctggatcgtctgtaggcgggcgagggtggggggggggaaggaaggagagctcagcctcaatcgattacgctaggaagccgtcccttgcgggcgacagagactcacgatgtgagggagcgggcccgtcatccgctcgggccggacgccagagtagtacttggtgttgcgctgcatctgggcgaccgggccgacgagggtcgagggggtgggcggcaagaagcggccctttaggaggaagtaggacgggaagggaggcttgaagagcgaagagaaacggtcgttggcgggttgcagttcggaacggggcaagaggcgagccagtagtcgttgccaatcgcccgccccgcgcgccctgagaatccgccggaccttcgccctgacctgaccgtcgccccggattcacgggctgacagagcatgcccggtcgtagccgaggtcgctccggctacaagcgagccaagcagcaaaggaggtcatggaacagcagcatcccctgacgccggcctcctctagagcttgttgtccatccggcgctcactcttgagcgcagttagcttcatgacgagctccttcagcgggaccgtcacgtccgaccttgtcttctggccggcatcgtccctgtttcggacgttgaccgacctggcctgctcctcctgctcgccgacgacgagcgtaaagttccactggccgagctcggccgaccggatcttcttgttgagcgtctcgccgctgtcgtcgacctcaacgtggagccgcgccttgtgcagcgccttggcaacctcgcgcgcgtaggggatgtacttgacgccgacggggatgatcatcacctgccggggcgagatccagaagggcctgggcaagcgggcagcgggcggacgcgcaatgtgtcagcgacgagagagagagaatagcgagcaaccgcacgggtgggaaagggagggggggggagacgcaccactttccagcgaggtgctccgtcaggataccaatgaaccgctcgagcgagcccataaccgcccggtggatcatgactggctggtggaggcccgcgccgtcgccattgtcggccgaggcgccggcgtacttcaggttgaagtttttcggcagctggaagtcgagctgaatcgtcgcgacctggtgctcgcgcttgagcgcgtccgagatggcaatgtcgatcttggggccgtagaactgggcggggcaggcaaacaacttcggaatgcccctcggctcgtctcggacgagctcgccacgcgccaaagagaggcgcccgacgacctttgccaagcgacgacgccctccccccctttgcctccccaaatactcctcggccaaggactcctcctagtccccgcgccatcaccgtctcctcaaacctgcccgaaggccaaatcctcccttcagcttcccttcgctcgactgcgagctcgagctcgtctcgtttcgtcccgtcccatcgcgcgagtgagagtgtgccggaaagagggctcgcccctcacccctgccctccggacccgagccggctgtccgtccgtctacccgttgctctctccgtccgttagacgatcgcggcggggggaggagggtcaagcgcacgtgccaagcgggtgcgagctaggggatgaacaaagacctcgtcgaacgaccccgggtgtcgctcgctcgcttgctctggcagcagcaagagaaacacgctctcgctcgcgagcggtttcgactcggcccagcccagctcggactcggctaggcagcctcgaggcttcgaggcgagcgcgtcgtccgacggctcttgcgcgcgccccgctcgctcagtatagcgcgcggagcaacgaagggagtgagcgaggagcgagccctctcgactggaccggccgagtcgctcttcgcttgacccctgcccggattgacccgctggggacaggccgggacgaggcgagcgagagcgtcgcgtctcgtttcggcgccgatagcctcagcggagcaaacgagcgaaccgagcgacgcaagccagaggtggagagagtgacgtccggccacgcgaagctcgcagaggacgaagggtgccggagatagaaggagggatgaagaagggaactgactgaaggcatgagcgaagccgacggcgccgactgggccggcggcgagccaggcccagtctgagggccggaagaagcggacgacgcgggtgaagtgggggtcggagtcctgagttgcgtgtcgagtgggggagtcgagccgagcccgcgacgcggtgcgggcagccgggccgacaccgaggggagctcggcatggcgacctacgcgaagctccacgcaggcaggccaccctgtctagtcgagagcgtcagcgagcgaacgtccgacggctggtcagctctcactcgctggagggtcgacgtcgagcgggagctgacagcttcactagtcgacaggtcagccgcctcctcccgtcactgctgcgcctgcccgcccgactgcccttgctctggacgagcgacggccgacgtcgaccttcgtctctggccaccaccacccatccgtcaagacgggctagacgaacccctcttcagctgcacgtggaagccagatcatcatgtccagcgctttccgctcgccgaccaaggccatcgtctcggcggccgacctcgcgctctggcaggcctcgccgacgcacgccgacgtcgtcgctttcgtgactggcctctcgagctcggtcgtcgacacgccgctctctcagccgacagcatcctcggccgcggtcgatagcctgctcgctcttctctccgaggtcgaggcgcttgtcggcgagcatccgccgcaagatcacggcagctcacgctttggcaacccggccttccggccgttcgtcgacgccgtccggtcggcgagcgccggctggctggcggccgtcgaggcggtcccagccgaggccgtctgcgagctcaagggctactttgacgccagctggggcgaccgcgaccggatcgactatggcagcggcatggagcttgactttgtctgcctgctgtgcgtgcctcagctctggctcggccgagccctcagctcaaagcagtgctgacccgccctcgcctcgcaggctctgcctgacgaagctcggcgtcttcaaggacgaggaccggccagctctcgtgctgaaggtcttctggcggtccgtctgctgctgccctcctcagatcttcttggccgactcacaggctgacgtccgcctggcgttccgtcgtgccctgctttgcgactgactgaccgccccccctcctccctacgttcccccttagcggtcgagacgaaagcgggcgagttcaagagcgcgcagcggtctaattgggccgaggtccatacgggcgacacgccccctccggaagaggagctcccaccgccgcccgcggacgaggcgccgcaagtcgtcgtcgtcgctgaagagccaccgccgcgccgaggcggccttcgaacggccgcgcagctccgcgagcaggaagagcgccagcgtctcctcgaagcggccgagcaagctgcgcgtgcggacccagcggaagaagccgagctcgcgcgccttgcccaagagacggtctatcgtgattcgagcgggaagaaggtcgacatgaaggccgagcgggcggcagagaagcggcggcgaaaggaggcggacgagaaggaggcagcaaagatggagtgggggaagggggtcgtccaaaggggcgagaaggaggcgcaggcgaggagggaggccgacgagcgtaatcgggatctcgcgaggtgcggccgcgtgggcgttcgcttcgtgggcgcggggctctctggaggccaaggactgaccgggcgcgctcgctttggacgacgacgcaggtacgcaaacgacgccgacctcaaccgcgagctcaaggacgtctcgcgctggaatgacccggccgccaactttctcacggtccgtctcccccccttccaagtgcccgctagccttcgccctcgcccctcgccctccccttcgcgccgacattccagagcctgactgcgtgccctttccctccgcgcaactaccccttgcagaccaagaagtcgtcggcgccccagctgccgcgctaccaggggccctgggcgccaaaccggttcaacatcccgcccggctatcgatgggacggcgtcggtcggttcctctcctctctcccttccatcgtccttctgctctccgacccggggagttcgacacccacccccgcccccctttttcgaaggagcagcacgtgatgaggtcttttgctttctttttccggtcgaagaggcccatctttgatggtcagaaaggggtggggtggcgtgcccgggctgaaggggcgggaagtcgaccaggctttgtcggtgtgggtcttgctggtcgaggtcgaggtcgagtcgtcttgtcagcccttctgccggtcggagcgagagatgaagcgaccgcggccagagcaaggtgactgacggccaggcgggtagcagcagcagcagcagcagtaacattcacccgaccctttctcaccctccttcctctttatgcatgcatgtatgcgccctttatcaatgcctgtcgatcctgctcctgaccaggaggaggcgagcgagcgatcccttctcgctcaggcctgctggctctcaagccgggcgaccatccctggtgcgcgccccctcgcgcacgacgtcactctcccctgacggccatcatctctcccacaactcaaccatggcctccttctccggcagccttcttacaaagaaccgcgctgcgttcgtccctcccctcctccatccatcctctccctgcgcgcgctcgctcgctgacgtgtgatatgccccgcccgcacaggctcgaagagatcgcctcggcgatggcgctcgaccaccggtcggtcaagctccgaaccgagttgattgaacagatccgctcggcgctcatcgacaggcaggacgtcggtctctttcctgcttctcttcctgaccgtctgctgtctgagagcgacgggctaagaatgggtggtggcccatgttggcctccctactgctggttgactgacctgcccctgccctcccctcccgcttactcgcccaccccgctccccaggaactgtctcacgacgaccgcttcgcaaagctttacgtcaagcccaagcagggccggccgagcagcaagccccggagcttcaaggaggagggcgacttgacggccgaggtccaggtgtgcgtctcccccccccccccccccccccccccccccccccgtgtatgcgctctcttactctttctgatgcgaggcatggcgggcgggcgggcgggcgggcgaggaaggtgtgtgtcggctcaagggggagaagcaggtctgcgccgagctgggcgcagtcgttctctcctcgttgagatttcctgcgtaacagctgattacaatagttacgctcggtgcgaacggcccgcccttactcccgctgtcgcctctggccaacggcgtctgtcctctttcccatcccctcttagcaacgatggcgccccagaccgacaagtttcgcccagagtacacgcttgatgtcgcgtcggttccccttcccttttcgccgctcgcccacaaggagtttgccaactgatgctccgccccgtccgcctgtcagcgacctcaaggagccggcgccgatgccggacgggatcccaaaggtcgccgagctcggcgtgacgtcggcgccgctcaagagcgcggccttcttcctcgggagcttctgcaaggagtataccggtcagtgtctcgctcgctttgcccctcttgctttcgggagagggagggtgagagacgagagacggacgatgggcaatctcgactcgactcgactcgattcaggccctcctcctgtcgaaagcctcagacggcgtagctggcccctctcgcgtcgcacgcccccccttcccccgcgcagaggcaaggaagcgagcaggacttccgaccgcttcgtctcccactcctgcccgggactcggattggcatgctggtctctgcctgctcggacgcagcgcgtgcgaggcgagctcattcgagccatccgtccgtcggcctcggctcgctggcaaacaggccgagttcgagtcgagtggtagcgagggccctttgggtcggctccgtcgctccgtctttgtgttgagctctcgctctcgcgcgacgcgccatgcaccgagaggctaggtcgagagaagcagaagagtgatgggctgacctccctcctcccctcctgctcgccccttatccggacatgacctcggccttgttggtccggagcgagaggatcgggaagaggccgttgagcgggccgaggacgtcttcaaacggcgcggtcgagggccactcgccgtcggccgtcagcttgcgatagctttcgggggcgtaatcggaggcgcggcgggcgcgtcagctcgcgagctcggctcggtcgtcgagcgttagcaagcaagcgggaagcaagacaacgcacttgaggtcgcctttgaagataacgagccggctcttggcgagcgtctgggtaagctccggcgcgagctcgggcatccgctggtactcgtcgcccctgcaccaaaagtcgccctcgccctcctcctcctccgacgccagccggagccggaacgtcccctcgtcaacgaacttcttccagcgcgcgccgagcgcctgcagcaccctctcatcctcctgggtgaggcccggaaagaccacggtcggctcggcgagcgtctcgagcagccagtgaaagtcgcgcgggagcacgtccgagacgaaccaggggattgatttcggatggaaggtcgcgtgggtgaccgagtcgatgtgcgagacgagaaagtcggcaaagacgaggtcggtgaagagctggacggggccggaagggtggggtctgggtgtgagctcgggacggaaagggggagcaaacggcagagacctagctgagccgtacctcgaagccagctgagaacgaccaagaaaaacgcttgtcagacatcactgcatacaggagagcaggcgtgtaaagtcgaggcgactaaccattgtcgagcacaaagtcgacgccgccctccttgccggcaccggcgcggccgcccatgagccagcgccaggcggcctcctcgtcgttccggaggatgtactttttctcggcgtcgccccgctcctggagctttgcaatgtcggcgaccgaggtcgagccggcgaggagcgagaggtcggtcgcgtttccccagagcgactggcgggcgggcgggcggacggttggaaaaggggttggggtgggcgcagagctggctgagggggggcaggtaaggtagggttggtcggacgaagcgagtgaagggggtggtctctcgcccctggcgatgaggtcggccgtcgtcgacctctagcctgccagatctggcctactcggccacacgccgcatacgctcgtttcggtcagacggtcggacaagctcctttacgttccctccccacagacggtcgttccgctcggccgaccatccagccccgccatctcggacgtccacttgcacaggccacgtcggtcaaaccaggagatgcctgcttgcttgcccctctcgcctccctctctctcaccccgccgccgcgcaaacctcccgtggccctcgcccgtccgcacgcccgccggtttgctcggacgccttcagcttctgctctcctctcggcggcgaggacaacggcatcctctggctggtcgagcgagtgcgggacgtcgattggctgggttgcgacgcgagggcggaggagaaggggcagcgctcaattgggttcgtcgagcctgctagcaaagcagcacaaccgtcggggcaggggtcttgccctctctcacctgctctcatcttgcgtcccttcgctctcggccgcctgttcttgagggctcggcggaacgggggttgctgcgcgcggggccggagaccgtcgcctctccgccttgcgtcttctcgtccgtagccgcttgttggcgagcatagcatgacctgctgtcgtcttacccccattcgataatcttgtctaggcgagagaaggaaaatagaaggaaggacgagggcaggtcgaagggtctgaggtcgacgttggctccctccgaccatcaccttcctccttcgcctcgagacgatgctccggtcgttcttccctgctctccgacagacgacggccgtcctccattccctccggccgctcagtctcccctcgccgtcctcatccccaccctcctcgtccgccgccgctcccggccgtcgttcgcgtccttgagcaggctgtaggccgcgaagaccagagcaaaggcaaagtcgtccgggagcacatagtcgtgtacttccgatacggccttcagcgaggctgccttcagcaaggcgaccttgtcgttgacaggaaacgggcctgtgagaagaaggacagaagagatagagggtcagcaggagtgttcgcaacgcgtcagacgggcaggcaggcagcgcgaggacgcgacatgggcaggactgacgcttgcgttgcttgcccagggccttctcggaaggcccggccgctggctggttggtgatttcgccgaggacgcgtttcgcggcgacagcgaggtcgcccttgccctgcgagcgcgtcagagcaagttagtctccacgcgcctctggacgagacgatagcaggagagcgtacgaggtgcgaaaggagagggacgtactgaagacggctctattgcttctgacggaggataggtgggagggggccgggaaggagacaagcgtcagtcgcgagcctccgtcgggaagggtgaaaggcaagcgggacgcgtgaaggtgaaggtgcgcggccagacgaggagaggatggagaggatggatggatggagcaggagaaggatgagagtagacggaccttgggctgctcattctcgtctaaccgacggtgctcgaccttggaggccgacacgcagcgtcgcttggtgttggcggccgacttggtgggcgtgctagaggtcatagtggaaggggtgtgagagaggcggagaagggtaggctttaaaggtagcgcgagggaggagtagggagcaaggagtagctggtgggccggaggggatggtgatggtcggtgagaaggcagcaggcgagacgcgccagagggcttgagaggaggccgcagggtggcttgctgcgcggcgcgcttcctgcttccgacccgcgcatgcgcgtcagtcgcactgcagcagccaggcgacgaccctcgagacgtcctggacctacgcacccgccgcccttagccgcaacccgcatgctcgccttcttccgcggccgacttcgcgcactcggtcggcagccctgggtcggtccagcgtcctgggtcgtgctcggctgcgccgtctggatggtcatcgaggccggcttgtgggctacagctcccggcagcggcggtgacttagccggtcgagcgacgctcgttggcaaaggaggagcctggtagggccggacgacggtcggcgctcgcggccgaggcagataagagcaaagtcatcgatccgccgccagtcgactggtcgctagggctcgtcagtctcgtcgagccactcgggccgccttttcttgagtcctgcgtcgtcaaactcgagaccgacgtccaagaccgaccgagcgaggccgcgcaggccacgcagcgaaggcggtcagaggaaggcgagcgggcgacgacagctcctgccgtggcctgtcgacggcgcagcagcagacgttgccttgcttcgatcctccgctcttgctctgctcttgcactcctcgcgcggcattcctatctcctgctcttgctcttctactgctcgctctcatgtgcctgcgcctgcgctgaggcagcctcgtcaggcgcctgcgcaatcgtccaaaggctcattggcttccctttcagcagcagcagcagcagcagcagcagccgaccgacggccgtacgtccttgtggtccacctgcgcccctccgctcccaggcgcgctccaagtctagcgtcatcaagacggattggaatcagtgagatctacgtgagggagggggggcacacggcccagagtacaacggcagttaaaacggcgggaagacgggggcagtcgtgcgttgcaaaattaagcaaacgagccgtcgtccgtcgcttgactggaagagagcgggagtagggatacagtggtgcatcgtggcgtgcgcaaagggaaagaggatggggggaaggggagccgctgagtcgtcgaggaggtcaggggcagggagggcaatcttgttggtgacatactcggtgtcgcgccagagctgcaacggaaggagcagcctcagtcgccggcgagacagacaaagcatgagctgaggaacggctggcagacgcacctgagtcgtcgcacgggccgtgacgagcttgagctgcatgacagtcgtcgatgcgaacctgcgtagaaaggagaggtcagctaggtgagtgcgagaagccttccggccacattagcacgcactcgtcgccgtcgccctcgtgcttggtctcgttcttcgagccgacctccttgagcttctcgagcgtctccatcgccttcttgctctcgtcgctttcgtcccaggtgtcggcccagtcggtgccctcgggtgcgtcctggaggatgtcgatcattgcctcggcagggttgacgcccttggggatcttggcaccatggcccttgaagtaggccggcagcgcctcgaccgcaccaaagtaggcgacccggccgccgctcttgaggaggaggacgttgtcgaactccttgaagagacttgccgacggctggtggatcgtgcagaggacggcctgaccgctcttgacaagcttgcggaggaacgagacgatgatgaaggacgactggccgtcgaggcccgaggtcggctcgtcgaggaagaggatcgacggcttggcgacaagctcgaccgcaatcgtcagccgcttgcgctgctcgatgccgaggccggcgccgggcacgccaatgatggcgtcctcaatatcatgcagctcaagaagctcgactgatagagggaagaggaggagaaggaggtcagctggtgcgcgagcagcagagagaagctgagcgctacgcactgatctcgtcaacgtaggcgatgcgctccttgtcgggcgtcgtccgaggctgccggagccgggcgctgaactcgagggcctcgcggacggtcgcctgcggcaggtggacgtcctgctgctcgcagtagccggttgtccgggtgaaggagagacggggggacggacctggtcgcgcggctctccggcgggcgagccgtccgtaatggctgtcctcgtacgtcagaagagcccctctcgtcagctcaatcgtccctccgcttcgacaaagcgccgccgccgtcgcaactgaccaatgacgaggaccggcttctggagtcggcccgcccgcgccgggccgaggacgagcggctcgagcaccttgcgctccatcgaggtcccgagcggggtcaggcccgagtagcggatctgcgagaggagcgcgagagcgccttgggcgtcacggatgccgttgccctcgaccctgacggccgagcaagagcgaagcgcgatcagcaggcgaagggtcgctcgcgaaggcgagtttagcaggccaaaggacgtactgcgagttgaggaaccggacctggatgccgtctgcgtcaaagagcgaggccgcatacgccgcccgctcaaggatgagcttgaggtcgtcgatccgtgtcccatcctcctcaaacgccatactcccactgtcgtcgacgagcagcacgacgtcaaagagcgcaagcttgatgaggtccgacccaatctcaagcgggagcttccacgtcgcgcacacctgggcgagcgcattcgacttagcaatctggcccgcgagctggccgagcgacccgggcgggtagaacgcctcgatcttctggtccttgacggcggcttcaaggatcgagagcgcggctgcttgcgagagcgagacaccgccggcgacggacgcgtgctggggcggagcctgcgatggggcgttgaactgctgctgctggccgtactgctgctgaggaggctggccgtactgctgctgctgctgcgggggctggccgtactggccctgctgaggcggctggccataaggcgtcttgacgtcctgcgcaaacgggttgttgctcttggccggcggcgggtggggcaaagccggaagcggcgccggccggggccgaggcgtgttgacgcccgagaacttggccgtcaggaggtccttaccctcctcgaccatcgcacggccaaactcgggcaggacaaaggcggccgagtggaccttcgagttgtagtagcggcagccggggacctcacgcaccggcttcgagacgtcccggccggcgtccttcgagcagacaacgaaaccgatctggcccgaggggtaggtcgggatcgtcgtaaaggcatactcggagacggggaacaggtgcttggtcatcgtccggaggtcctggcgggtgacgagcaagggagagggcaggcgagcgagggagggggttagcctcagtgccggcactgtcgcgtcagtgtgcgaggcgggacccaccttgatcaggggcaggtgaagccagaggcactcgccctgggtcgagagcgcgccgtcggccttgagggccttcttcatgagcgtaaagtagggcgcctcaaagagcgaggcggccgggccgaccgggtcggacgagtcggtgacgatgacgtcgaacgtgtcctcgaccgtcggcaggtacttgaagccgtcggcaatcttgaccgtcacccgggggtcagacaggacgtcggccatcccgggcaagaactgcttcgacacccgcgggacagcctcgtcaatgtcgacgaggacaacctcctcgaccgaggcgtgcttgaggacctcgcggacgacaccgccgtcaccgccgccgacgacgaggaccttcttcgggttcgggtgcgaggccatcgggatgtgggtaatcatctcctggtagctgcgagggcaggagcaggaaggggcgtcagcatggccaggtcggtcagaaagggctgcgcgcgcacgacgcacgagaactcgtcccgctcggtcgcctggatgacgccgtcgaggatgaggacgttgccgtacgtctcggactcaaagacgaggacgtcctggaagagcgacttctcggtgtgcaggatctgcttgaccctggcccgacctcgagatcgacctgctgcaccgtcggatgggccacatgtcccggaacgcgatggatgctgttctgcgttatcccggcgtgcttagtaatgcgatcagctcgaaggacatcaaggcctacttgcgtgtgcaagccttgcgttggttctcgtcagcacaagacgccgttcccgacgtcaacgacggtcgtcagcaggcccctcgagctggtccacacggacctacaaggcccgatgcctgacatctcgctcggcggcgcccggtacatgctcaccgtcattgacgagtgcacggactaccactgggcttggtcgatcagggccaagagcgacgcagccggcgtgctcaaaggctggatcctgcaggtcgagcgccagagcggtcacagtatcgtaacaatccgcagcgacaacggcggcgagtacctatcgaccgagtttgttagctggcttcgctcgctgggaagtcagcagacaacgattgccgatacgccgcagcagaacggcaaggcagagcgcgcgaaccggacgatcgaggaaaagatcacggccctcctgctcgagtcgggcctgcccggggcgtactgggccgaggccatgacctacgcgctctatgttctggcccgcaccgtccgaaagtcgaccggccggacgcggcatgacgactggtttggctcaccccgtcatttgaccggctgcgcgtctttggctgcacggcgtacgcgcacaatcccaagcacaagaagcaccaatcgaagtcagtgccgtgctggttcatgcgtccagcggaagacgcattcggaaagaaggcgtaccgtttggtcgacaagcggaacccgcacaaggtcgtcttttcgcgtgacgtcgtcttcgacgagggctggacaatgcgcacgaagggtagcgccagcagtgggagcggccagacggccacgatgacgccgttgactagccgaatgccgctcggccttgaccttccctcgtcccccccgtcggcgcagccgacaacatggggttccctagcccggctggataggcgggctctcaccccctgtggaggggcgaaatcctcccgtcggcgcagccgacaacgtgcggggcggtgtccaccctcccgaccgggtggccctcacccccgcccggtgggcgctgtgctctcgtactaatggatagggatggggcacgggtgaggtggcagaagaccctcccaacgggtctccagcccggctagctagcccggcctccacccccgggggtccggcgaaacccctccgtcggcggaattgacaccgtggggtgtctatccccttgaccgggcggcctccgcctctgcccggtgggcgccgtgcccttgtactaatggatagggatggggcacgggtgcctgcatagaagacggcaccgggtgggccctcaagcgccggagggctccggtccctcaatcgccggagggctccctttttcatgcccctcgtccggggccggccccggaacgcggcggcgggtggtggccggcggccgcccgctccgctccctgcccccgggcgcctgggccggtggccctcgtccccggcggccgctcgcctgcgcgcgcgccccgcgcccgccccggcggggccctcaagcgccggagggctccggtccctcaatcgccggagggctccccaaacgcaccgcctacaccgcccccaagccgacaccacgaggttcccatagggcgttgtaaacgattggccggaaccatagtctggttctggcccacgcttacgagacgctgctcaggtacccttcggcggcagtgcaaaccgggcagcccaccccggggcctggtgacccaagcccacagggtggaccgcccagcgtgcactgtaccaaggttcccatgaggcgttgtaaacgattggccggaaccatagtctggttctggcccacgcttacgacgctgctcaggtacccttcggcggcatccacgcccttctcctccacctccacacgacctaccacctcccgcacatcgtcatcacctccttctccctcccgccctcgacggtcctgccggacttgccgggcccgccagagacgtacgctgtgaggctgatggaggcggacggcgggaaaaagtgggagacgtatcctcgtctcttgtctgtcgcgtcgacctacatccctccttccttctcctcctcccccgccgacccctcaacaccagcaccaccaccagcaggggcaagcgcaggccggctctcgacgactctcagccacttccccgagctccccggctacttctcaggcgtcggcgacctcttctcggccctcacctgcgcgcactacaccggcgtcagcggtggcgcaggggcgtttgcgcaagcggcgggcaaagcactgtttacgacgcagggggtcttgctgtcgacgcatctcaaagcgacgacgacccgtccctcctcctccgacaagccgccggaagaggagcaggaggcaagcgacgacgagtcggacaagcgcgaccgctcgcgccgcgtccggcgcatgcgaaagcgcgagctgtcgctgattggcagggccgagagggggatgattgagtgtggcgaggtatgggaggggagagaggtcgatctgctccagtgctagaagggggggggggtctagatggtttttggctagaaggaggcgtcggtcggtcgttgcgacgagatgagggatctagacccctgagacggtcgtacgagcctttcctcgtcccaccgaacccggacagcaaggtcaagggtcaatcggtcggctggccgcctgaccgaagctcggcttgatctacctctcagcctccagcgcaacccttccgctgatcacgtgccagctagcgcccctttgccagtccgtcctcgaaatcatcaagaccaacgacaatccaaaaccttgcaacaaagcgaatgggggtgacaaagcgtcgaaagggcgtggccaaactgctggaggcccgtcgaaggaggaggagggagggaggggtgtatgcacgagcaggcgacgcgtgcggacccgaggaaagcgagctgggcgggcagcgggccggggattggcagcgaggcgactgctgctgctgctgatggtgctgctgctgttgctgtagcagttgccgatgttggagcgaggctgctgctgctggattgtctgttgggagctgctgaaggaacgaggtctggctctgagggtcgccgtctggagtttgaagcagctcgtttcgccttcccgaccatctcgtactcgaccatcgcccacacgactctcggttcgtcctagagctggcctggcggagcgtctcttgcctagctgctgctgctgctactgctgaagcccagctcttccttcagcgcagctttgcccttagcccacctccctccctccctcacccgcctctctcgctttgcccagcatgaagtggatcccgctcgagtccaacatcgacgtcatgaactcgtactcgcgcgctctcggcggcctcccaacggacggcaacgacgacgacgccggaaaggaggagcgcggcgcggcgttctacgacgtctatgggacggagcccgagctgctggcgatggtgcctgggccgaggagggcggtcttgctgcttttcccgacgggaggtccggtcgataaggtggcggcggacgagggcgtcgtgcttgatgagaaggacacgacggcggatggcgacgacgagatcttctggatgccgcagacggttgcgttccctctcgctcgctcgctcgctggctttcgaggccgggctgtcggctgatgcgtccacttcctctcccgtcgcctgtgcttcgctccagatcggcaacgcctgcgggacgatggcgctcctccatgcgctcctcaacgcctcccttccccttaccccctcctcccctctctccctcttcgatccggtggagatgctgactgatccggtggagctggtgactcacgccggcggagctggtgccggagaacgaccggcggccgagggttgccgggtctagactcggccggtggtgatcgggtgtcgcgctggaggttccatgtgaaagttgcgaaccggtgacgggtggggaactggtagtgcttgacttctcttctgtcgtgcgggctgaggccctgggttcgaaccccaagccggggatttgctgttcctggcaggtcgaaccatgacactgaggtcagttcccacctttcgctcttttgcccaccgcttgtaacacgtcctaacccccactctaggttgctcattccgttccgtccttcgctcaacagccagcacgtccgctgcgacaaccttcaccggcgtcgacggcgcgccgacctcatcgaccatgacgcgtcctccaccaatagcctcgcagtcgcttcttctccactccatggctccatcatccctgccgtcggggtttcgagctcatcgatgccaaccgcatccactattgatggagcgacgacttcagccaacgtcgacgcaccctcgcacgcctcgcgcgacttgccgcacccgactgtcgccatcgaccagcgtcacgatagcccggcgcccggatcccgctcctcggaaggcaaaaagcgcggacgcgacggcgacgaccagggccgggaccgtacggggcgctcatggggccgtcaaagctcgtcaaaagctcgaagcacgacagatgtcttccgctttgcgcaggtggcaacaatatactgacttgtcatggttctaggttcagcgagtctacaagtcacgacttcaagggtatataggtccggaactggcgcttttgtcagaagcgtcactgtggtcttttggcccagtggtatcgcgttggtttccgggcgcggttgtaacattccgtctggcttcaccgtgtatacggtctgcgcggcgggttacgttcctccggtccagctcccgtggattgcaaaaccactcgggacgccggcggcacgggaggtctcgcgttcattaacggcgcacatttggccggatgggccacacggcgtactcaatcctcgttcgatctagttgtcatattagttaatcaatgatttctcgcttcttagagtagcatcagagtctgctcaaacatacagaaagataaagcgtgttgcttgcgacgcttcccccttagtgacgaccgccaaaacctctcatcagctgctgcaaagcgtaaaccatcccctatatatagtagccgtcgccgcctgccctcatcgtctggctttgtatctgaccctttgagcgactgtgacatcggcgctctgttgcgacagctgcgctccctcgaagcaactcgccggtcgccgtgtccgtcttggtatcgggtggacaggatgaaccccacaactcgctccctcctctcgctctctctcgcccgtttattctctttccctggctctccgaataaggcgagctgtactctcgttgcccactgtccgtcatcctccccttatttcagccctcgtcccgagcagcggcgcttcgccctctaggtcgcggggtcatgcctcaacgtctctggtaatcgtgtcgatgagtcatatcgcactctcaagcgaagcgattcgctaagctgttgacaaagcagtcgagaacccattcaggaatgactatttaggtctgtgtaaatatcgcgattgcaaacacgataccgatccgggctgcgctatccgggaagcggttgaggaagggaaaatcgcggaaacccgtttcgaaaactatcaccgtattctggaaagcatggcgcaggtgaaaacgcgtaaaaacttttctgatacggatgactgacaattaagctaaccgtcgttagaatcgtcccctttttttcaggatccggcatgtaggccggatcaggaacgacaaaacaatggcctggaggctaccttgttaaattcatttaaactttcgctacagtacattctgccgaaactatggcttactcgcctggcgggttggggcgcaagcaagcgggcaggatggctgacaaaactggttatcgatctgttcgttaaatactacaaggtcgacatgaaagaggcgcaaaagccggacaccgccagctaccgcacctttaacgaattctttgtccgtccgctgcgtgacgaagtacgcccaatcgataccgatccgaatgtactggtcatgcctgccgatggcgttatcagccagttgggtaaaatcgaagaagataaaatcctgcaagccaaaggccacaactacagcctcgaagccctgctggcaggcaactatctgatggcggacctgttccgcaacggtacgtttgtgaccacttacctctccccgcgtgactaccaccgcgtacacatgccgtgcaacggtattctgcgtgagatgatctacgtgccgggcgatctcttctccgttaaccatctcacggctcagaacgggccgaatctgtttgcccgtaacgaacgcgtgatttgccttttcgataccgaatttggcccaatggcgcagattctggtcggagcgacgattgttggcagcattgagacggtctgggcgggcaccattacgccgccgcgcgaaggtatcatcaagcgctggactttttctgacagggcattcaccacggaaacccctacgccatgcaggccgccggagactttatacgagttatcatcgaacttaccgcccgcgtgcagcacggtcatgatcacttcggcggcggacacgccctcttcttcatggatgccggtaggaataccacggccgtcgtcctgcaccgacaccgagttatcggcatgaatggtgacgacaatatctttacagtagccagcgagcgcctcgtcgatagcgttgtccaccacctcgaataccatgtggtgcagaccggttccgtcatccgtatcaccgatatacatccccgggcgtttacggaccgcatccagcccttttaataccttgatacttgaggagtcataagaattcgacatcaacgtttctcgctcatttagtcctgtgattgaacggttattttaccctgttccacgcggaacatcttgccattttcgcccaccatgtcgctaatctgctcagcggtaatggcgctgacaaacacctgcgcctgcgtcgccttcagccgctcggccagcaggcggcgacgggtgctgtccagttcggaggcgaagtcgtcgatcaggtacaggcacttcagcccgttttgccgggtcaggaactcgccctgcgccagcctgagcgcgcacatcagcaacttgagctggccgcgggacagcatgtcctctaccgctacgccgccggcgcggatgcgaaaatcggccttgtgcggccccaacgcggtataacccaactgcctgtcgcgctcgaagtggcgctccagcagttcggcgtagtcgctctctttgtcccagccgcgctggaaggaaaagctcagggaaaactccggtagaaattgggcgcaggtggaaccgatatccgctgcgatggcgacgctgtattcggcgcgccaccggctgatgccctcggccaacggcaccagttcccgatgagggtgggggtgggagggcgagtgcgggaggagggaggcgatggaagggaggaaggtgattgcggagaggaggagggcgaggatggggaggacgacatgcggccgtctgagccagctcggccgtttgctggcaggagggaaggagggaggagaggaggcttggaggaggcgcgtgccggagaaggtcctcggcagaggcggggtcgctgggggaggcgagtccatcgtgcgatggtagttggcagcgagcagtaagggccggcgggcctttgagccgaggcagggaaggaagggcttgctgcgcgcggaacgaacgagttctagaccccggccggcaggtcgctgcgtcttgcatgcgcacttgcgagctgcagtgatgctgcgatcgcgagggggctactgtagtgaccggcctaacgcagggtcacttgctctcaaggcttggaaagaggcgtgcgaatgtcggctcgcacggtctggccagcccgcgcacccgggggaaggctgggcggaactggtttagagagtaggtgattcctgagcaggatcaacacgaaacgggcgcgcagcgacgaccgagcgcggacgggcagggaggagtaccgccgccgcccgtcatcaacgaaaggctgctccgtcgctcggggtgtgggtgggcgggtgaacgatctgcagcggctggcgcgtgaggagagggagcgaggagcggcgaggtgatggttggggcagctcgaccttggccttcccgttgtactctcttcgctcactgcaccgcgcagaaaggcgcaggctttcagcagctcacgtcagtcggccctctcttgggttggttcacttgcagcacacggtctggcgcgagtaaggcgatggatagagacagcgatgggagcgagcactacaacaggcgagcaagcgagcgagggtcggtgggtgtgcaagtgaggagaggggtgggatggggagggggtgcgcaggtggagagagagagaaaggctggttctttgactctgaactggggcgagagttgattcgattctaggtttggcgtgtcctttctcacaccctttactgaaacgctcttttctttaccacctccccaccctccgcccagctccgcgcccgttggaccgccgagcaaatccactcgcaaaataccgcctcgtcgcccacgctcggccccatcaccttcactccactcatcaaagagcagaactttggccgggccgagggcgagagctgggagaagggcggcttcgtccggggtagtggcagggggttccgctttgaggagggcgagagtttggaggatgtcgggagacgggccgacgagttgcgtccccatttcttgtccttttggcctgtttgatctttctctcacgctcaaagaaggagattgcgctgactccccttttctcgctcgctcgctcgctcaccagagccatcgacagattcatcctcccgcacgtgctcgagtcgtcccggacgggcgaggacaggcacgtcgtcctcgtggcgcacggcatcttcaacagcgagctcgttggcgccctcctccggcgccggacgaacgaccgcaacttgggaaggaacgaggctaggacggggccgatgacgaatacgggtgagtttcgagagagcgtgcgacggccggctggccggctgagggagatcgctgctcgccagagagagagggagaaagaaacgcttttgggtttcgacgaggcgaatcacagctgacgtattttttgggcgttttgaaccggtcctcctgcaggcttccaccacattttgcttgacattgctgtccgcccccccccctcttccttcttccatctttgcttcccgctgacctcctctcttttttttccttcagtcgcccaagtccaacccctccgccgccctcctcccctcagcgacgagagcgagccgggcgaaagtggcgatgctttgacggacgacgacgaggtcgagcgactgccgacgccggcgaagaggcggccgccgcgtttcgccctgccgcctcctttcgcccgaccaacaccatctcgacctcgctgccgtctcgccacctagccccaactcagctgccagcgcgctcttgacccgctccgtcgtgcgccttgcccctgtctactccggtcctcgtcccgagagctcggctcgctgaccatcgcgcctgctctgtcgcttgcaggcccgacgacgcccggaccccctttctttgcccatcgcacctccttcgccgcctcgcctcgtccatcggacctttcgggccgctcatcaagcagctggagtgtccgtgagttgattgtcttccgctagcccacgcgacttccgctcgggcgtgatggttgctgatgttcgctgcgtcctctcaggccggcctcgcctcgaccttgcgcacacgaccttgcgcacaggccagcccaaccttcattcgcccaacaccgcctcagcatcatgtgaggtgctccctgcctgtgagctggtcactggacggtggctgacagccagctctgcatcgccttccggtcggataggttgcgtggcagcaagcgcggcatcgctcagcatcagccgcagcgacgaccattcggccaggagctgaaggtccagcgcacgactcttttcaagttcttccgcaactaaagttcttgacgctctgcgacgaagactttgcgcgcatcctgctcgctccgcattcggcgatcgagacccttttcgtcggccaccttttctcgcaacggtacggccgagacggagaagaccttgagccgaccttccttgccgacccgacggacgcctaccgcctcttcatcgacgaggtctgccgggccgttctcgtcgacgccgagccgcttcccatcgggtggaagtgacgccggtggcgggggatggcgatgggatggcgagagcgatgggaaaggaggctgcagtgccaggagtggtggaggagggactgcgcctgcgcgcggtgccggcgtgagaggagcgtccgtcggctgctgctgctgttgcgagatgtgcgacgggcgcctcagcggcggcgacggcatcaacgggtgagactccccttgcacagacacaagaggcgccgccgaccactgctccacggccacggccgtctggtccgatggaggaggtcgccggaggcggcggcggtctggcgaatccggccggccgcgcgaggaggacgctggagcgagcggcgggggcttggactcgctgctgctgctgctgtttccgacgagagggccttcaaaagccgggccggagctcgcccagatcggactggcgaagaggtcgtcatgggcattgcttgcatcatcgtcgaggggtagaggagctggaggaggaccggggtgcgagcggaaggccatgaagcgggcgttgagctgcgcggcggcggtcatcgagcgcggcggcagtgacggtagggccatcttgccctctgcctttacgcgcggcggaggtgccgggctttcgtggctcacaagcggcgggagaggcggcagaggccttgacgggcctctgctgctatctgcttggagggagggcgggcgcatctggcgggacggtggtcgcaagcgggcagcaagcagaggagcaagtccatccaacgagggaccgttaaccatcgattggggattgaggtgggcagaaccccatgaataacccaaacaatatccccgatcggtgggaagtcctgcttgggcgagcgggctctcgtctccctcaatcccctctcgccttccctgccctgcctagtcaagctcgcccgcctgtcgttctgccagcccggaccccaagcccgcccctttgggcgaggcggggggagggggggaaggggaggatgagcgagagggggtaggccgactggtgataaggggattagggaggtcagtcggcgttaaaaggagcaggcgcccgtcggaagctcgtcagaggtgaagatgcagggcgagcgagcgcacttcctcactcgctaaacgagtcccatccccagcgagaccctcgcctcgccaacccccccgctccctctccggacatcgccttcgtgcgacggacgacaacgtgccgtgctcgcttgccgagccaacccgacccgcgcaccctttcttcaaccctcgccgccttgcacgacgtccctatcgcccgcccacctgcccgctcgcctgccgttccacagcgtcggcagcccaccctcgcccgctcgcccgcctagcgcacggagcacaggtctcctttagaagccgagaggcgtgaaagtgcaagcacgcgatgcgtggacctcttctctcgcctgctcgaccccccctcgccgacctgcgcctagacgcccagcacgcccccaaaccagcctcgagccgtccgtgcgtgcgggctcgacacgcggtcagaaccccgccttcggcccctcttcctctctctctctcgcggacggaaggggagagaggaacgagtggaaggggaggggggacgcttcgactttgaagggaaggacggcggtttgctcgcgcgcatgcaggtaggcaagacaccgacgcccaacctctcttctccaaggcagcgtcaaggagagatatcgcgacgtgctcggactcgcacagacaggagacgagagagaacgaaaggacgacggccagcgaaatcgaagacgcacctcgtcacagtcgccccggacgacgtgaacctcgggcgcgatcgaccggaggtactcgtgcgtctcggaatccgagacgttgcctgtgcagaggattgactggatagcctactcccctctcactctcctcccccctctcctttcacccctccttgcagccctcccaaaagacctcacactaggcctcaaactgccgccgttcgtccatgccggccaattcggggagatggttgagtttctggagggcggagaatgctgtccgccgccgccggcgatgggaggggagaggaaggaggagcagcaaagggggaggtgcaagattgcctatctcgcatgttgcaacacgctcggcggctgcctcgccttccctgcctcaaactcttcctcccaagaggacgaggtcgacgtcgaccgctttggagggctcgcgggcgaagggcttcatccgctcgcgctcgggtacgtctcgggtcgtgtctccttccgcttccggtcgcctcgtcagtccaaactgacttctccccccatccaccctccctcaaaggaacgttcgcagattctccctccttttctcgtcctctctctctcccgcctcatccatagccatcataggcatcgggggagcctccactccggcccacgtccggtcgtttcgaaaagcaggggcgcgaatagtgggcgtagggagcgcgttggggagggatggggtcgaggtgttcgggaggctcgtcgaaggctggcggccgtgatagctatgaatgggcttgttttgctcacggagacgaggggtgagcgaggtcgacgacagagacttgtcgctgctgctgcgcctgcggtgacaagcccctcggcgtcagctctttcgcccggccctgtccctcgctcccctctccctctcatccacactctcttgtccggtttcaactgcacaagtcgccctctcatcttcttcccagcaagctctctagatgtcgtctgtcggtgagttagcgtcccgtctgcccattaggcccattcctggcgcccggaccattttcccccttcagccccggggagggggcaaggtgggaggagggaccgaccttctggatccgaccagagaaggtcgcacatgggcccgtcgtgaggcacctcctgcttgcggtctatcaggcgaatctgaacgaaggggcgaaagcagggagagagaggggtcagccttcgtcaaagcaagggacgcatacagtcctctcttgcgcagacgcacttgatcgagcgtcatcacgctcggactcagcccgccatggacgcaaaacacctttccatcgacgacggccccgagcgccagatagtcaaagacgtcgcagcagtagcgccagacgtttgcactgccgtacttgcgctgacactcgtcgtagaagccgtagacttgggtgatctggcgcgactcgtggttgccccggatcagggtgatgcggtctggatagcggactttcaggaggaggaggaggaggaacgtctcgaccgaatagaagccgcggtcgacaaagtcgccctgaagcaagggcgatcagggtgtcagggctacgtgcaaagacgacgacagtagcgaaagcaaagtcagggcgggacgcaccatgaagaggtaggccgtccctgggcactcgccgccgtgccgaaagagctccatcaggtcaaagaactggccgtggatgtcgccgcaaatctgtcgaggacacaggagcagatcagcgagctgggatcaagcccttacagatgaagcggacgagtcgtcgagagctcgtcgttggctgctgatcgccggagccgcgccagtcggccagagtgcagccttcgactggacagcctcgtgaacgggcaagcctcagcagggcgcctttccagcccgactgcctacagcctaggccctcagccgagcccaagctgtcaacagcagcaccctctaccctccccttgccctccctcgccgaccgccgccgacacgcccagactcaagtagcttcaggccgccggactcgaccgcaccgccagagctgaggacaaaaggccggaagggagcagacacccggcgggcgtacttgagcgtcttggcgtgagctgcggccgagagggcgtccttgacagcgttgcgagaccggtcgacgacggagagcgaggtgtcccagtgcgcctgggttgagagcgagcgagcgtcctgtgaggcaagcgaaacgacggtgatgtcgagctccttgacgccgtcggggccggtgatgcggagatcggtccgaagctgggtgccgggcacgagcggctcgaaaacaacacggtagcgtgagcaagatgagagggtgttgtgaacgagacgcttgacctgttcgtgtcgaccgagcgtgaccggagcgcggccggtgcaagcctcgtcgtggccgaacggacaggcctcgccacagtcgacacagaagtcgagtgaaccagggcaaagcgtgcggtaatgaaggcccgaggcgacgtcagcgtcagacagctcgagactggatcgaaaaggcacgacaccgagccagtgacgaccgaggacggtggccgactcggagatggtgtcacgagctaggccgggcagccgtcggacggtgcgctcgagtcgggcgttgaaggccttgtcgcatcgcatgcgctgggtaacgaggggtccgtcgtcgtcgacgtcaagcagaaggaccggagcgagagcggcgtcggctgcgtccgagctggccttgtacgcgagaggcgcgcactctgtgtgcgagaggacaccgagaccgccgagtcgggccggcagagtaacgaggtcggcgtccgttgcgaggcgtcgaggcgaagaccggatgagaagagccgagtcgaggagagcgccgtcgagatcgtcccagcagccaggaaggtcgtccgtcttgagcgtccgctgcaagcgtcctgcgaggcgagagagacgacggtgatgtcgatctcgcggacaccatcgggaccggtgatgcgaaggtcggttcgaagctggctgccggggacaagaggctcaagaacaacacgaaacttgatgtttgaggagagggtgttgttgatgagccgcttgacctgctcgtgtcgaccgagagcgaccggagcacgacccgagcaggcctcgtcgtgaccgaacggagctgcgtcgccacagtcggcgcagaagtcgagcgagccggggcagagcgtccggaagtgaagaccagaggcgacctcggcgtccgacagctcgagtaccgaccggaaagggacgacaccgagccaacgtcgaccgaggatcgtgccggactcgaagacggtgtcgcgctcgagaccagggagccgacggaggacacgttcgagccgagtgtggaaggccttgtcgcaccgggcccgctgggtgacgatcgccttgtcgtcgtcgacctcgagcagaagggctggggccagcgcccggtcggccgcctccgagccggatgcgaaggcgagcggagcgcattcggcgtgcgagaggacccctaggccaccgagacgagcgggtagggtgacgaggtcagcgtcggtgtcgagacgtcgaggtgaggaccgaagaaggagagctgcgtcgacgagggccgcatcgaggtcgtcccagacagggttagggttactgcagcatcgaatagtgtaaggcaaggtcaaggcgaggcgggacgggcacagagacgaacggggtagggtcgggttggctgcctaggggtagagtggacggaggagggaagtcgtcgagagggggaagagaggcgcgagagggagagctacggaagagggaagcgggcacacggaagcggagggtgaaggaagacggagcggaacagatgcggaagagtgatgtacaacggcagtctggtggaagaccgcccgctgtcagaactgctcgccgagccattccattttcatacccaggcattgctggcggccgtgccgacgctgccggcttttgattgaactttccaataccataaggaatgcgtatgtttcgctccccctctctgaaggtggttgctacgctggcatccaccctgttgcttgccggttgttttgacaaaccggagcccgccgccaccggcgcagactcgtcgcggattcggctggcgatgctgctgccgccgcgttcagcattgtcgccattcagcgatgatgcgttcaagctgtcgcgctggcgtgccggcgaaacgctggtggtgcttgatgccaacggcgatgcgcaacccgcgctggcgacgcactggcaacaactggatgcgctcacctggcgctttaccctgcgcgacggcgtcaaatttcacgacggcagcgatttcaacgccagtgccgtggtcaatgcgctgaccgccgccacacacgccacgccgaaaccacgcatccttgacggcgtaacgctgagtgtcgtagaggaagacgctcacaccgtgcagattaaaaccgccacccgcgacccactgctgccgcaacggttatccagccctcagctcaccctactctcgcccgccgcttacggcgccaacggcgtggtcagcccggtcaaaaccggcaccggcccgttcgttctgacgcaggttaacggcaccagcagcgctcggttggatcgttttgacggctactggggcaacaaagccacggcaccgggcattgatgtcgatttcgtcccggacagcgccgcccgtaccgccgcattacgcaccggcacggccgatctggtggaggcgatcccggtttcgcaggccccgctgctggacccagcgctggtgcatgaagacccaaaccactcaacccacccgcccgccatgaagttctcgaccccgctcgccctgctcgctctctcgctcccgctcgcctttgccggcgacgtccatgacgtcaagaagtgcggccatcccttctgctccctgcttgtctgctcctgtcgctgacgcctggtcctcccctttcgcaggcacgacgacaagaaggacatcgagctgtgcgccctttctttcgctcgtcccgccgctcgtcgtgctgatcctcgtccttttcctccccgctgccgcccaggatcaccgtcatcgccaagaagtttgagctcgtcaagaccgtcatcgacgtcaagaagggcggcgactacggctaccactacgacgacaagaaggacgttgacgcgtgcgtctcttccctctctctctctctttctcgactcgcttgctgactgtcctgctcgcccgccccgcctgcctcgcctgcagcaagatcttcgccttcgtcctgctcgacgacaagaaggacgacaagaagtgggtccgcctctcgcgctcgcttcaccccatcgctgactcgggactcctcctcgctgcagggactacggctacgactacgactacaagaaggaggaccacaagaaggaggatgacaagaagtgcgccgctcgtcctctcttctttctgctgtacgccggctgacccctctcccctcgctcgcctgcccgctcgcagggacgacaagaaggacgagaagcagtgcgccctctctcctgctcctcgtccctccctttgctgaccctcctgcccctccctctcctcccagctaccgcttctaaacctctcgcgccgactcgtgcgcttcctcttcctcgccctctctcccctgtctcttatacacctctccgagcccacgagcctagcgctcatctcgtatgccgtcttctgctgcgatgggggatacgcagggaagggggtaagggaagaaggacaggcgggagcgagtggaccgctcgcgaaacccccacaaaggacgcactgttgttcaacaggtagatgcccgccatcccgggcgtcttgaacgctcgcgcacgggcctccattgagcttgtcagggcggcaacgacgtcgactgcgaatggacggaccgaaaggggggagggtaaaaggggagtcagcctcgagcgcgcagaagattgagggggaggcgagaggggtcgaagcgggctgcgtagaaaggggccaagagcagcagaagagcgcgagaggggactgacagacaaagtgctcgacgagcgaatctccctcctgacccgccggcaccagcccgcccatcagccacttcctatcgcccaacgcgtgcaggaaacgggcgacggtgtgtgcgtgcgaggggagggtgaggaggtaggctaccgtctgccgtttttagggtggaagaagagggttcacttagctataagcgagttaggacaagaaaaggggggcgcgaacctcggttgtcgtggaagagacggcgacgctcggtgcctcgcccggccgaaggacggcagagactttggcagactcgactgcttcggggatcgcacgcgtgcaagccgctcggagcgcttttgcaagctcgccttgctgctgctgctgttgctggcccgctgctcctgctggtaacgtgtcgaatccggcgagccactcgcccgccacgccgcccgagcctgcgaagaactcggcccaccgcgccccgaggtccgtcagctcgccaaagagcgcataaagcctccagggcagcggatccttcttgagcgtctggacgtgcgctccgacgtgctgcttgagggcggtgagggaggggacgagggcggtttggaggattgaggaggctgagcggtccaacaagaacgggaggtcagcctctttcgatcacgtatcagacccagagcgagtgagcgacggggacagactgacgagcaatccaggctttgagctcctccgaatctggtcggcctgccgacgccggcagctcagagaacgacgcggcagcgggagctgaccacgagcccacagtcgcaggtgagccggacggtggccctgtgtgctgcaggcggcgagagatgacggtgggcaagggccctcccggcctcttgaagcccagcgcgagagccgctgaatcagagcaacaaggcggcagcgtcagcgggcgagggtcgtcgggacttcctggtgttcgagcgaggcaccctgctggcaccagatgcagaccgattcaccgaaggaacgtacgaaggcgtctcagcgcacgggcaaagggcatgccgccgctttcaggcggacggtcgacgactgaggcgcgcgcggccccaggagaccagatgcgacggtcgaggtgcgagcgtgcttccagagccgagcgagcgggaggatcggatgttgcagcaaccggtatcggccgactccagaagggctggaagagaggtgagcaggcgagcgaggctttgcggcaagagagaaagagagagatgaccagagctgccgagagggcgacggttcggagggacgcgactcggccggggcgacaacgagaggttcccaggctgctcaaccccgacgtggtgcccctcactgtttctcagaggacgaacgctacgtccaaggacaacatgaacagacgacaggtgggcagggaaggctagtaggagcgcgggcctggcgccggctcgcgatcccagtacttgacgtactcgggcccgagctgatcgaggctcgagacgccgaggttgcgcatcgttgtcgcaatctcctcgttcatggctttaaacaggctaaaaatgcatgaattatggttatgtaagcgtattgtcgagattatcaagcaacaagccactggcaataaatgccgaaaggtaaagaaaatagtgctggaaatagggcagctagtagcagtcgataagcacgcattgaattttagctttaaagtgataactcaagggacgattgcacaaaatgcagaattatcgattgtagaaatcccaggtgaagcaatatgcaattcttgtcaacaaattgtaccgatgaaacagtattatgatgaatgcctggtttgcggcaatcattccttaacactgacaaaaggtgaagaattaaaagtgaaatcaatggtggtggaataatgtgcgggatatgcggatgttcagtagaaaaaggtcaaaccatggataatgggcatcatgctgctcaccatgagcattctgtgcctcatgaacattcagttgatatcgagcagaatattttagcgcaaaacaatgaatttgctgctcataaccgggattattttctcaggcataaaattttggctttgaatttgatgtcaagccctggatccgggaagacaacattgctttccaaaaccatttccgaacttggcaaggaaatggatattgcagtcatagtaggtgatcaacaaacaaattgtgatgcccaaatgctaaaatctcatggaggggatgcctggcaaattaatactggaaaagtatgccatttggatgcccatatgatcagtcacgccatacaagatatttccctaaaaaagcaatcgcttttatttatcgaaaatgtgggtaatctcgtatgccgtcttctgcttgaaaaaaataaccagattttttgcgtcctgaaaggatggattgaaatctttgagtgcagtagagtctcctacagggggactggaggtgacacgcccccccccacgattctcgacttgattctctcccgtctgctttctgatcttgtaatgcctccgctttgcgcctcgtctcgcgcgtcgggaagcgaggaagggcgcagcgctaggtcgccgaccggcgtcaggagtccgagtcgagtattcggacgactacgaccacgacggcgacgattgagcgagggaggaagcacgcaacgctctctaactcttaccatcagccaattcttaccaaactgtcgttttcgctcagcccccttagtcgctcgctcgctcgcttcacgcctgagccacaagagcgctcttccttccctgcgcaaggaaagggcggtccggcgatggaagggaggtggtcgggcgcaagcgaacgagcgagcagaggcgagcgaagaggcgaaggaggcgacgacaggagggtacgtgtatcaggtcggcgtgggtgcggtcaatcgcggttcggacgacgagggagaaacggccgagagaagcggaggttttgcaaaaaaggggaatcgtagaggctacagcagggtgtgggagtacagcttgagcaagggagggcgagggaggagtgggggaagaagatggcgaccggccggggaggttgggagccagcctacttttgccgggcgggccaagccgaaccgggccgccggaggaggaggagaaagagtatgagcaagagaaagaggtcggagggaggggccgtcctaatttctcgacccccagaaatagcccccgtcgccgcctccgacactcgtcccgggactcggcgtccgaatgtcactgacgttcatccccgcgactcctcccgccgatcccaaggcgaagcccgagccggcaaaaccgaggctgccgagcccggcagcaaagggcgactgcatgccgtgggcgtcaatgaagggcgagaggggcggtgggctagacggtgatggtcgccttgacgggcaggtcgcgcgagctactgccgaccgagaacgtgtactcgcccgacgggatcgtccaagtctggcgctcgacgtcccagacggcgaggtccttggcccggacggggaacgtgagcgtctgcgactcgccggcagcgtacttctccttgcagaagccgcggaggttgcggacgggctggtcagtgaccgacgagggccacgtcatgtactgcgggcgggggcgggaggccgactaggtcagcggcgagaaggcgggcgaagagcaaaggcgcgaacgaaccatctgcgcaacctcggccgcgtccatgtcgcccgtgttctggacggtgacgccgaccgtgtagagcaggtcgtagagcgagccctcgcggtcgagcttctcgttcgtcagctggacaaagtcgctgtcggcagccggcgtcgactcgaccgtcgcggccgagtactcaaacgacgagtacgagagaccgaagccgaaggcgaagcgaggctcgatgtcctgagcgtcaaaccacttgtagtcgatgaagaggccctcggtgaaattggcgatcggctcaaagacgtccttgatgacgccccggttcgtgccgccggggtagtcgtcgatcgacttgccgacggtgaagggaagcttgccgctcgggacgacgtcgccaaagaggaccgaggcaatggcagcgccctgctcctggccagcatagtaggcctggcggaagaaagaggcgagtcagtcgagactcgccagacgcaagagcagccaggagcgaagaggggggacgcacgaagacgacggcggtgacattgtcgttctcgatccagtcctccatgtcgaccgtctggcccgagtggatgacgacgatggtgtcggcgcaggtgcgggcaacctcgttgatgcggtgagtcgggttagtaaccggcttcccagccgccgccgacccaccgcacgaccggaggccggcgactgctcgacgtcaagccatcagcgaggatgagtggatcgaagtatgacgtcgaaggccaagggaccggcagttctcgcccagcggtcaaaggaagggttggatcaaggttgccgtcagcgagtggtggcctgactgcatcgccaccatttcgagttaccgaggctggcagatggcgtcgtgatatacatgagctcgctgctccttgagtcaggtgtacaggtcatgctggcgatcaggaccgtccgggatagaccgctgcagaggagcagagcagggagagtcgggtcaggtaggtcagctgaaaagagcagcttccaagcgccttgctgttgggacgtacgcaaggcctccgtctcgacatcttgcgctggcctggcatccatcgcccagatacgcgcccgctgtagccgctcgaaggcctcccaccctctgccttcgatcgggtagatcctgcagctgaccgtgatgcccgacgcgctcggaaggccgccgcccgtcgagggcatgaaggagaggacgatatgattcgatccgagcaggggctgagcgaaggctggagccgtgagcgagttgagcgggatcgagagcgagtgtaagggtggatgcgaggaggagggtgcgctagccgtcggcagccaggacgagaggctgcgtttggtcggaggcggcagagacggatcagccgacgtctagacgggtggagagacgagttcggtcgccatgaacgcactatgaggtggcgctgcccagcacagtcccagctggtgcaacagcgagacttcctggtggggtcgacaagtgcgccggcggaagggcgtcgtccgcagcggccgacagcgccgtcggtgcagcgtccccaggctatgcgcgccattattccgccgaccggcaaccagttaatcagcatgatcaaggcgacttcgctggtgagcgtgattgctatgagcgatctgttgtactcggtgcaggccatctataaccggacctttgagattatcccgatgctgatggtagcggtgatttggtatctgctgattacgtcgatactgaacgtcggccagtcggcgatcgagcgttattacgcccgcggttcgcgccgcacggtttcggtcggcaaacgccgaccggcaccaaatcaggaatcggagagcgcatctgccgccgtcgggcagccctggatgaagaaggaggaggcatgaacgatataatgccgctggtacgtgcccgcaatgttcagaaaagctatggcgacaatgaagtcctgaaagggatcgacctggatgtctatccgggcgaggtggtggtgattctggggccttccggttcgggtaagtcgacgtttttgcgttgtatcaaccatttggaggatatgaacgccggttcgatcatggtgggggaagagcagattggctacgaactcaagcacggtcgtctgcatcgtctgtcgccccaccgtatcgcaaggcagcgccgggagataggcatggtgtttcagcagttcaatctgtatccccatatgacggtgctgcagaacattatcgaagcgccaatcggcgtgcacaaacggcccaaaggggaagcgattcgctacgcgaaggaattgctgaccacggtcgggctgagcgataaggccgatgcctggccccgtcatctgtccggcggccagcagcagcgggtggcgattgcccgagcgctggcgatcaagccgcggctgatgctgttcgacgagcccacatcggcgctcgacccggagctggtgggcgaggtgctgggagcagtggtcgtcctggccggggcagagcgtgcggatcgacaggccagcggcgacctcggccgacgtcagacgcaggttggcagcgaacgggatggccgacatccagcgccgggcgatgggcgaagcgttgtcgaggacgacagctcggtcagtcgaggacagggcggccaggagagactcgcgacgcttgacgaaggccgtctggcaccgggcccgctgcgacgtcggctggacgacatcgtcctcgacctcggcaagatcgtcggcatcggcaaaggcgaccttgagctgggcgtcggccgactcggccatggcagctcgagcgtggggcgagacctcggcgtgcgagaggaggcccatgccgccgagccgagcgggcagagacacaagaccggcgtccgatacgaggcggcgaggcgacgaccggaggatgtggaagcgctcgagcagggcctcgtcgagctggtcccacgcgccaggcaggtcgtccgtccgaagggagcgctgcagatgacggaggttgctcgccaagcagtgacgcaagacgaggagagcttcttggccaggcaggtcggaaagccgcgagagggccggcagctgggcctcgactttggcagcaaggaaggcggctcgaacatcaggagggccgacgcaggtgccgaggacctcgaggccgtcctgagcgacgatagcgagcggcgtctcgagacacttgcgcaggttgagcacaagcccgcacgcgggacgttcgtcgaagaaggtggcaaccgagtccagcgcgccgggctcctccgacaggatgtacacgtcgtcgaggtaggcgagcaaggcgtggcccgggccgaggttccgttcgagagcggcgagggtgttgcgcgcgccgatcgaaaagagcagagggccgagagggtcgacctcaagacgttcatcaccaaccccgaggtctttgacgtgtcaaacgggatggtcaaggtgctcgaggggcccggactcggtgcattctgcctgccttcctgcgccgttggtcggtcgtcgtcccgaagactgaccccccttggccctccccttctcctgctttgacaggcatcgagatcaacgaggcgctcgtccgcaagaatgccgaggagagcaagggctttgcgtggcgcaacccgacctggagaagcgaggacggaagtgtttccgagtggtaggcgcgacgagagatggacggagggaaggcgacacgctctctctcatgcccgcctcgttctcgtgcccgccaagggggggggaggatgtcttccagccctccacccttccctccctgctctctctttccttcacgacatcttctctctctctctctcgccctcatgcggccctctttctctgtaccatgactttgcagcctgctttgccctttgggccgccgggtcgagtattcgacgagtggacgcagcggcgcaggcgtcgtcccaggcgtcagcagtcgctcgtctttctctggataagaggcgcgcagggtaaagcagcgcaggagctgccgtccactcagcaagcgactggcgagttgcgtgagtgctgacggcccgatgtgcaccccccttgccgggcccgggggtcgtacgcaaagaatcgcgtctgcccgcagacgcgcgcgagagagagacgacgaggttggcgcgtcgacagctgcaggctcctcctgcacgtcaccgtcacgccccgccgcttttgtccttcgccctcactttgctcgccagctccttgccttctcctgcagccgttctattcctctagatcgaccgttcaaaaagctgcccaggggtgtcgaggcgagattatctaaacaatgatttactaaaataaggatttatacatcctaaggatgtccttttggaaagttttctactttcttaatataagctctttaaataaatttcaaacttgagatgctttcagtttttaatttgttcaatttggctttactaccgtgctacttaatttttaacttttgaataaagtctttttatttaagtaacaatagttaaactagagattgaattatctaaatccttgcgtacaaaagataaattttaatttgcttattttaccctcagtagataggaaccatcctgtcttacgacggatttaacccaactcacgtaaccttttaaatagacgaacagtctaacccttccaatctgctacaaccggaggataggttgagtcgacatcgaggtgtcaaacagagaatttgatttgtactttagctctctattaacctgttatccctggcgtaacttcgctcattgagcacattgttttccatacaaacactaaattagtgtttcaatgtggatcatttaaccctatttacatatctgtgcgacttgttagtctttcagtttaacctatttatgcttatatgcgtcatgtatcattaattaagaaacacttaaaaaatgtttctggatactttgatttccagacaaattatatagatctaggatacctcagttattttttatgaggcctgcgccccacagaaacgatcaattaattaatgtcaagtttaaactttaaagatctttattatttaaggaggatatctcatttttgtctaaacgactaacctctatactgaacagaaatagataaagcgagaaagaagagatcatcttttggatgattttttctttaatcaataattaactatcgtaaagctgccagggtctttccgtctagctggtcgggccctggatgatagcggccgacgtgagctgcggggtgacggggaggaggaatccgaagaggcgcgtcgtgaaggagagggaaagaatatgtgagacgatgagaagagagagaagtcagttgaagcatcggtcgccttttatacgctgagcagctccttttcgtcttctttgccctctttcaagctggaagaccctcttctccatggttggctcagtcagcagcagacacaatacgcgcctccttcctctcctttgagagcagctgtctcgcgctgcacaagcagtgtgaagaaagcaaggcgagcgcccgagtaaggtcgccaatgcggaaggtagaggcgtcaggcggcgcggtgggggtcagcaagtctagagcccggaggccggagaggcgccggctgcaaacagaccggcgacgcctcgctgtccatgtgaattgcagcggccgcgcgctaccaacgtcgctcttttccacaaggagcaggtcagccctccttttgattctcggtcgcgaggtcgtgaagatgactgcgctacgaccgcgtgcgttccgaacctcagcatcggtggatggggcaaggctagcgtttcggaggaagggtacgcgtgctgcggcagcaatgcaagaacgccactactgagtaaatcctccggctactcaagagcagaacgggtcaaagcgacctggcacgaagcttcctggcggtaagcaggagactgcaagcagttcggccttacaatgagccgggtaacgggtcgactgaaggggacgaaggtcgagccgagcccgcgacgcggtgcgggcagccgggccgacaccgaggggagctcggcatggcgacctacgcgaagctccacgcaggcaggccaccctgtctagtcgagagcgtcagcgagcgaacggagtcaaggtcgtccgttcgaagcgagcgctgaaggtgccggaggttggcctgcaagcattggcggagcagtaagagggcctcctgaggcggcaggtcggcgagccggtcgatggccggcagctggtcggcgatgcgccggtcgaggaaggcagcgcgaacgtcaggagggccgatacaagtcccgaggacctcgaggccgttggcggcaaccgaggtaagcgacgactcctggcatttggcgacgttgagcgacaggccggcgtcgttgccgtcgaggaaggcaatgaccgactcgagcgctccggcctcggtcgagagcacgtagatgtcgtcgaggtaggcgagaacggcatgtgagtcgccgaggtcggcctgaagggcctcgacggtgttgcggatgccgagcgagaacagaagcgggccaagagggtcgccttgacgaacgccctggctggactcgagcgcggtgaccgagccgtcggcgccagagacgaacagcggcgtcggcgtgtcgtacgcccagcggccggcgcggtagagggccggagcatgctgcgacagggccttggcgagcgaccgacggtcgagcgagttgaaggcgttggcaaagtcgagcgaggtaacgtgggtgaacggcttggggaggttgccatcgagggcccgctcgagcgcgcgcgtgatgggctctgtgccgccgctggagccgacgccgaactggaagggcagcaactgggacggagccgagtagtgacgaacgagggccttggtgaccagccggtacaggagctcgccaaccgcgatcggccggatgccgccgtcggccttgaggagcggcgtgagcctcgacgcgcaaaggagctgctggccaggagcgattccctgggcgacctgccgtgtgaggagcaggccaagctcattcccccgccctcgaatcgtgtctgtctacccacccggcgtcgtccggcgacgctatacaaccagtctctcgtgctcgcttgaaaggctgggtcgtgaggatatgagcatcgcccgctcctcactcgccaaaagcaagctgcgggtcccacgacgccgcgtcgagaaagtcgatcgacgccgcagccgaaaacgactctggccagacgaacgacaagacgtcatccgacaggccctggaacgagtcgccgggcccgaaagttgggacgacgagctcctgccggccgacgggcgtccgggccggcgacgggtcttggccgtcgggtcgggatttcgcgagaagggcccgaatgcgctcggcgtggagcgttgcgattgatgcgctgtggtcgttggtcgagtgtcagcatcccctcaatgagaaggcagaatggcgagaaaaagagagacgcacccgcttgcccggaaggagccgacccgctcaaggaccgagacgacatggaggcagctcatctgaagctcgggcgtcgggcccgcgtcaaacatgttggccagctgcgaacggagcgaggcacgcgcagtggcaaggtcagccagcggcaaagccgaggggttgtaaggagtagagccgcgcgcaccttgagcagaaagacggcgctgaaggcgatcgagatgacgataaagttgtttgcgtacagcagctggacgtccgagtcggtctcgtcccaagtagcgatcgtctggaggctgcggatcgagatggatcggcactggtggaggatctcaatcgtcgactggccgccgggaaaccggagcgagatgaggttgaggacgacaaagatcttttcgctgaagagccggatgtaggcgtctgcactcggcgggtgggggggggggggggggaggagaaggtggagaagaagggggaggagaagaaggcagaggcgagcggcaagaagctagctagaagaggcactcaccgacgatgatgacgctaatcgacggatagggaggaggcgaaaagaagaggggagatgtcagccctcttgacactactgagcgagcgagcgcagcgggcgccgacagagggagtgacagcgcccgtcagcgaacgaagaccaaggagtcagacgcacatgagcaccgcgaccccaacaccaatgataatcttcatctttgtgtccttccaccacatggccttgcggaccttgtttgcgccccgccggaagccttgggccgagacggcgaggttgtcgctgcgagcaaggtgggttgtggggaagcagacggggagataggtcagcttgagaagaatactcaggcaagcgagcgagcatccgtccgacagcgagcgaaggtagacaggcgtgcaaggtcgtaacgaccagatgatgacaagggaaacgcacgtcttgtcctggagcgcgtcgagccgctcgcctcgctcggcgacgcgttggatgttctcacgcatgacgtcctgcgtctcgtcaatctgcttctggatcgctgccgtctagcgcgcgagcacgcagtccgacgcatgtagcagagcgaggagaggggtcagttgctgcgcgttgtaggcgagcgagatggcagagcaggaggaagaggaggagcgcaccttggcattccccgccggcctcgccgcgcccgaagggttggtcgacgacccgccctgggggatataagggtcgtactgtcccatccagcccgtcagtcaagtcagcttctcatgcgtgcgggctaagggggaagggagggaggggggcgtacgggtgcggacctgaggagaaacggacgttgtgcgcgcaagagtgaatgaggaacacgctcccgtccgcgaccttctcgagatcttccttgaagccgtcaaagtcgaggccgaccgtcttcttgtcgtagtagcggtacgatttgggttcgatgccgacattcttgaagatggccgggtggttggcccaggtcgggtccgaaatgtagatttccttgttgccggcagggaaggggtagaagcgggcgaggaagagcgcgccaaggtgattggcgcccgtgccagagatggtttgggtcctgcagtgggagagaaaggggcggcgcctcctctcgtcagcgacctgcgtcatctaaagccctcgctgctcgaacggagatcggctcagcagaagaggcggaaggcgggggggggaagggacagacgtcgtcacccggccgtccttgatcgccgcgctccctcctccaaggaggagcttcgccgccgggcccgtgaagtccgccaggcccgcgatcggcagatactcgtggtcgaggtcggccttctcctcaatcatgcgcgccgcctgccggacgaaggggtcaagggagggagagggtcagcgttgcggtcggtcttggcgaggagcggagggaagctcaccttcttgacgacgggcaggacccagggcttgccgtcctcgccacggtacgctccgacgcctgggcacgtccgaggccagccggtcgaagaggaagacggacgggggggggggacgagaggaagaagctgggaggtcagtcgctcatgctccgtccatcaagcagcgtcgacacggtgggacaagggccacgagatccggaaactgcccttctaacgctaccctctagcccgactgaggattcgtgtcatcccgccatcgaaccctcgttcggatgagggggcgtgtgagggaggggaggccgggaccgagggagctcgagcgctggcgaaggaggaggcgagggagggatgagctggaggagcaagaacgatagcagggcaggcgagctgaccttttgtaggcgtcggctcccagacgggccctgctctaccgtgctgagctcaggacggccgaccgtcatgcccgacggcctcgacctggcttggacgtcgtatcgaccggtcgccgtgtcgtctgatgtgaagggaaagggacgacgcggggagacgggcgagcggttgcgtcggccctgtttgttcatccgagtcgtcggacgagcaacagtcagcgacgcgagccagcagggcccatcagcagcgggcgagggctgcagccagaggcgcgggccggcgagcagggtcgaccggggaaagtcgaggtcgtcgcccgaggagagactgtcttaccgacggcgtggcgtctcgcgttctctcgggcctgccggcgggcgaggcccgacggggacagcagctgtcaaccatcgccggcagcatcgaccaggccggccagcaacactcaagcagacaggtctcgcaggcaagccctccaacggccgagggaagctgacgcagacgggtgatcgtggcgtcgtcgccgtgcaggcgtcggcggtcgctttggccgcccggccggccaccttcgcgcgccccctctggcgagtctcggcggtcgaccgccggcggcctcatgcaggacgatcccgggccagcctcagcggcagaggaggcgggagggtgggtaatgccgtacgccgccgttgatcgataccaggcgaagctgacgtcagcagcagagggcacgatgcgcttgctttcagaggcagacgagagaaaaggagggtggggggggtccaacagtccttgccagtccgtccttcccctcccctcaagctcgaccgccagactgagcctgaagaggccgtcgaagtcacctggggtccgtgtcctcccacttccaacccgttgctcccaagcgtcgccaggctgaccctttcgaatggctgggcgcgggcagaggaccaatcgcggatcaacgccttctcaaagctcaacacgcggatggccgagattgaggacgagctcagaagggtgcttgtgcgtcccccctcccctttcctctcctgctcctgctccttctgcgcgcgctcgccggctggagtgcacgggtggtatgcaaggccgtgctgactgactgaatgacaccgtgctgcttctgatcactgcctctcgagagtgaaggaggagaaggaggcgctcgatgacctctcgctcgagctcgagctcgcagacgacgacgagcccgtcttgttccgtcctcccccctcttgttccgctccctcctccccttactgctgctgctgatcaccctactccctgttctttccacaccccgcccgctcccaggtacaaaacgggcgactcgttcatccacctttcgctcggccgcgcacagcgcacgctcgtccgggacgttgcagaagtcgagggccgggcggcgaagctgcgcgagaggagggcgacgtgcgaggagggcatgcgggagctcaaggtgcagctgtcagttaccgctctctatctcctccctctccccgtctctctctctttgaccgtcaggctcgggggcggtctggctgcccgagggtttctgtcggtcgtgcatccgccctcccgagggaatgactgcgcaaccctcgctgacgctcccttcccctctccttctcccccctccccttcacttcgacttcctttgcctgcccaaggtcggcttggtccccggccttcgcgcagatgtcgacctcaagcagcgcctcgcggccttcccggccgtcgactggcccgagcttccacccaactcggcccggggtgtccgtccttccgtcacgattgccgaggccgtcgctcgccaggtcacgtccggccgtctgtcccgcgcggctcgcctgctatctggcgctgccaaggtcgcacccctctcgccggaggtcatcgaagagctcaaacgaaagcaccccgacggtccgatcagtcccttcgccaccgccgccggccctgctccaggcatggcgcccaaagccgacatcatcgatgaggtcttccgcaagttcaagatggacacagcccctggcgtctccggctggacacagcctctcctgtcggtcgctcttcgtcgtccggccgtcgtcacgttcgtgtcggtattggccggtctcgtcgctcaaggctcagcacccggtcaccggctgctttgcgcttcgcgtctcacgcctctcgtcaagcccgacggaggcatccggccgatcgctgtcggcgagcttctgttccgactggtggccaaggtcttgcttcgacactacttcaagcccgacatgctccttcccaaccagctcggcgtcgggtccaagggcggcgtcgagccggttgtccgagcggtccagcgcgcgctcgacaatgagctgcccaagtcatatactcacctcgtctcgctcgacttcaccaacgcctttaacaccgtcgaccgtcgcgacctcgccgcaggactccgcgactttgcccctgccttctaccgcgccggccgatggatctacggctcgtcgtccaagctcgcggtcaccggtgccgaggattcgttaaactgcgcatcaatgctgatgccaatttcagcggcaatctgctgccacgcatggaaatgcagatgcgcggtatcggtgattacaccatccagatcgaaaattaccccttgcagtttcattcatcctcctgatgtttggtagcggtcccattgaagggcaaaataaaatcacccaaacagaaaacagattcttcagccacggttataagctgaccgttcaaacgcagtgaaacgggcgcagaagttcgaatcgcaatacgctgcgcgtcaagagtgacctgtaattcgcagccctgccagaacagagggaaagacaactgttgccactgctcaggtaacgccggattgagatgcaattcaccgtcacgcacgctcaccccggcaaaaccctgaatcgcccccagccagatagcgccagttgcggcagcatggataccatcatcacaactatgcggatcagcaccaagatcgatttcagtcccctcgcgccagaactgataactttgggtcagcaggccacagcgtgcggcaacaatgccgtggattgctttacttaatgacgagtcgtgaatagtgcgcggttcataaaattgcagattggcaagacacgatgccgctgagaactgctccggcagcatgtaattgagcatcaccacatcagcttgtttgaggatctgcatctcgttcacttctgcgcgtgaataatccagcagtatggtttgcttccccgccgccgctttgtatttcgcaagattaatcgccggcttagccataaacgaatcatcctgcggcaaaacgccgtcgggctgaatttctggcagccgcagttctttaaggaacatttcggcacgatgaataaacgcgtcgtcgctacggcgaggagggaggcgaggagggaggttaagttccttcgacatcaaacggcctgctaggctgaccccttttgccttacctcgcccccctcctcgcttacctgtgcatcggagcagtacctcgacaccgtctggatgtacgtcaccctcctcctccctttcaccttcccccctcactcccaagctgacctccccctcgtccattcgtccgtttagaaactggttcttccagtggtactttaccctcgctggcgtcctctccatctacacgacagcgagcgcggtcatcagctacctgacgcccgcggcagtccagcgcaagctgccggagtatcggctcgtcgtaagggatcggacggagggtgcgctcttctcgcccttttccccgcctttgcttgagcgtcgtcgacctttcgagactgacctaaagcttcgaattcgggggggcgtcctgacaggcctggtcgacttcaccctccccttgctttcgctcgtcctcgccctaccggccgcactctacctccccttcacctacgccctccagtctcagcctgcactagcctccaacgtcctcgccctctccttcgcagccagctcgacgtccctcctcgcactcgactcgttccctaccgccgcaacgctgttcgccggcctgctcgcatacgacgtttggtgggtcttcgggacgcccgtcatggtcgacgtcgcgaggcggttggaggcgccggtcaagattgtgctcgagaagggcgggaagaacaaggggtatacgatgcttgggctgggggatatcatcgtccctggtacgtcacacctcccctcccctcactctcaccctcactctgcagaactcccgacccgaagctgacccgctcgccctcccctggtcggctagctgcgggaaggagcgggcgggatggggcagcagccgagcgaccgaccgtcagcagtccgaccggcctgagcgacccgacagagagcggagggagcgtacagttcggcgcggtggtcaggctgactcgctcaggctagtcgtccgttcgaaagggcctggtcggaggtcgaggaggaggaggtacggggcagacagactactgcgggcgagcgcgcgagatcgtcgtcccagcgcgagcggacctgagaatatgcattgctcgagctcgtagatctgcatcgagcgcgttgacgcgcctctcattcagtctcccgcaccatcacacccaccaccatccctcgccgacagaccacccacctgaaccgctctcagcatgtcgtccgacaccgtcgcgtccgtctccgacctctggtctttcgctccttgcccgcccgccttcgactgacctcgcgcgcttcctgcctgcccgcccgcccgccttccctccgacgcctctcagccaagccgccaccaacctcgcaaaggccgccgcgccgacgctcgacgccggactcgctgcggcccaggacggcgccgctgccgtcgcatctgccgttggagacgtcgttgacaagggcaaggcgaaggcgagcgaggtgcgtttcttgggcccccctctatcgagcaccctcttctagcacgtcggccaacatcgagtgctgacttgcgatttgtcttcgcttttcgtcgtcccccaactcgtcggcgatgaggctatggaggatgacgacgaggaggatgacgacgaggatgacgaggaggatgaagacaacgagatggatgaggacgagctcgaggatgctgacctcgaggacgacgtggagcgggaggagggggaaggattggaggtgaaggtgaaggagaaagtgaggtcaagctggatggcgagctgcttggcaaacggataccagacggctgtcgtcgcgcatgcgccgtcaagggggttttcagcgatggcaaagagagctcaagcgcgcgcgcacgcgagcaaagggaacgcacgcgagagcccgatcgaccggcaacacgcccacaggacggggccagcattcatttctggcagctcgaccccgtaccgcctttcgagccttcgcgcaagcgcccgcatcgcccgatggagcccctcggcgctcggcggctccctcgggctcagcgcggcatacgcttggccctggaggtgggcgcgcacggagggagggacgagtggcgactgggcgtattcgaggaacggcagttggcgggtgtggagcaggtgaataatttcggacaggaggaaggggatacgcgttgcgcggaggccgaggaggacgagcgcgagggccgagaggggcgtgagcggccgccgctgcttgccgtttaatggaggccgcgcggagggctttttgcgggtggttgggtgcggttggggaggaacgttggcgatgtcgtcgtcgtctgaggaagaggaagacgaggaggaggacgaggaggacgaggacgaggcgtgctcggcctcgactgcccggcggatcgtctcggcctcgtcctcgctgtcgctgctgctactgctgctgccctccgtcgtgctcccctcgtcgtcgtcgtcgagcccgcgcttccttggactctgcgttggactttctgccccagccggacctacaccgcccgccgctgccgtcgctgaccctttgcccccacccctctccggccctttacggctgatcatgcccagaccgtaaatcagcttcaaccgcaccgacagctcgcccagcggcccactaccggataacagcggttcgacggcgtacttcacggcataatcgtctttgcgaaacgcctgcagcatcagcaggctgacggcttccgccaataactcgacggccatcagcataaaatttctgaccgttttcgatgcattcagggattccaatacccggttttcaaatgcctgcgtatcatccatcgtcgcttctcgtacgttaattccgcgcacagcgccgcccctgcgcggtggaacagctgactccacgggggcatggcttttcatcttcaacgcccccgtcctatccaacgcactcgattgaaaagcagggacacagcctgacctgtgccgagacgcgccgattactgcatggcgttatacacactcaccgcttttccgacaacctcgccgtcggcatccagaccggaaatctgcgccagcgcaaccttcggcccttgcgaagcgatcaacgccgccagttcctgcgcctgcgggtcctgctcgctgcgataatgcatcgccgcggcaatgccctggatcaggttgtcatgcggcagaccgtattccagcgtgcccagcaacggcttgatcagccgatcgccggcgctgagtttgcgcagcggctgacggccgacgcgctctacctcatcgtgcagccacgggttttcaaagcgggtaagaattttgcggatgtaagcctgatgcttgtcggcatcaaaaccatagcgacgaatcagcaccgcgccgctctcctccatcgcgccttgcactacgaggcggatcgccgggtccagaatagcatcgcggatggaaccccttctccctccccgctgccgcccaaccctacggacggacgacatcagcggccgccgtccccccggcccttccctcgcaggcaagctcgcatgcccctacgtcgacggcctcgcgctcttgccgtggcgggcgcgcgcgcgattcgacgcgggccatgcgctcgaggaggacgtccgtgcgaaatgggttcgtccagccggccggtcgtcgggtcaggttggcgtgcatatatgcgtggcgcgatcgagctgacagatacacctttctcttgggcgaggcaagctcgcagacgtctttgaccttgcaatcaaacggctcgacaacacgcctgcgagcgcgccccaccggccaaagcgcgtcgttgtctcgcttgcggcggtcaagcgcgtccatcggcggcttgccggcggggagggtccgggtctgtccaccccttcccttccttcttgtcctttctttcagccgattttgtctttgcttgcgcgccaactctggctcgcacccgtccgagtgtcgctgacgactctcgttcgctctcggcaacccgcatgtacgcagacgccgcccggcagaccctcgaagaagcctaccgcgccgttccgcccgacgcgcgccgggcgacggtccggctcgcgctcgtctatttgacggaggacgtccagcctcggctcgggcaggcgttgcttgggagacttggggaggtggttggacgggggaagggatggtttgccccgcttgcgggccaggggaagaaggcgcgcgggaaggaggacgaggcgcgtccgccgcatgcaagggtctatgcgccgtcgacctccttcagctgacacccctgcccttaccctcctctcccacccgggttgagcgacgcgcgcgagtgcaggggcgacttggccggtgctcgttggctgctcgcggttcattactttcgggtcggcgggcgtgcgacggctgaagtggagtgaggggatgggcgaagaggggatcccatgagggttcttcctacagtagctcctctaggctgggacgatgcagggagggaccgagtgacagcgtgtgggttgattgagaccggcttcctcttggcgcccttcaccataagcttcagcctgagcctggacgactggtcgtgctggtctctcgagagtaactcgcccatcttggaccggctttagccctaacgaccagcgacgaccgctgctgcgcggacccgacccgacgaaatcgtccagcctcgtcctcgtcctcctcctccctacacctcctcacccccaatccaccatgcctccctcctccaaccccaagcgcacgtccggctctagcaaaccgaccggctctggtgcaggcgccggtggtaagctgaagcagccccaagagcagaagcagcagccgaggaaacggagcggcttccgcgtcggcccacagaacgcgccgaaggacgcctacctcggcaagggtccgttgtccctctcctttctgctatcgcccatctttgcctctgagaacgaccaagagaggctgaaccctctttctgtgctccccttcccgctcggacagccaagaagatcaaggagaacctgatcaagaatgccaagctcaagagggagtttgcaaagacgctccggaaggaggggatggagtctgggcggcttgccgagcggagggctgctggtggcgacggtgcggctaaggggagagggagggggaagggcaaggggggcgagagaaggcggaagttgagggcgggagacgagagagagaagggcggcacggtcgaacggccgacagcagcagcagcagcaacggcgggcggcggcggggagaaagaagagagactaagccttgatgccgttcgcaaccggcttgccattcgtcgtcgtcgtcgacgaggtgccgacgacgccgtcgtcggcctctccgagcccttcaaagggtgcaaagatggcctccttctctttaaaggcattgtggacgaccttggtgcgtgaaagagcagaagggaggtcaggctcttgctcagcgaggggggtgagagaagggcggaagaggagaacgcacgttgacgagataatactcgtccatgatgccctcgatcagcgtccgcgactggctcccctccgggtaaagcctcgcccattggccgccaatcgcaaacgcctcgtccttccaggcgacaaacgagacggcctcgacgatcgtcggctggataatctccttgccagggaagacaccccaggtgacggcgttgggtccttcggactgggtgttagtccggaggtcctgtgggcggacgcgggcgagcgcgagcgagcgagagggggtgtcagcagctgatcgttttcatcacgggaagcgagtcgtgcgaaatcgggagggacgagggaggggagacgcacgccctgccgattgaccgcataatacgtcgtctgcggatcgcgctcgatccggccgacgagcctgtcaagcttctttggcgagacaaagaactcgaggtaggccttctggtagacgtagccgtttttcgaggggccccagccgtggatcttgtccgaggagggggcaccgtcggctgacgtcgtgactcacagctcgccgttcgtctcccagacgtcgtacaaattcatcacgttcggatggtcaatcagcttcataatgacaatctcgcgctcgatcccctggaggaccttgtcggatttcgcgccggcctccgagatggacatgcgcgacgagaggatcgcttgcttggggacaatcttgacggccgcatactggcccgtctttgcgtgcttggcgagcttgacgcggcctgttttaagcggagggagagggtcagttagcggttggacaaggcgggctgtgggtcgagcggcagccctgcgagcgaggcagcgtcgactcaaaggcggtcgaagggccggacgagcagctccgagggggggggggaaggccaacgcctctgacctctaggggtcgacgacgcagtaaaccgcggcgcgggtgagagagaagagccgactctctcgagagcgagagagcgtggcgacgctcgagctcggctacgcgtgtctagcagacctgcgccggtccgctctagccctctctgcccgctccgccctctagccatccgctctcgttccacgagacgccgctccgaactgatggcccagcccaagacgccctccctcttccacacacacactaaagtctgcgcgagcccggcgctcaaatggagcagggcgcaggcggaggaaggaggacgagggacgcaccactcgacccccggccaatcgtccgtccgatccgccaggccccgatccgcttgacgtcctcgcccctgcgatcgcggtcgtccttgcggagcatctgcggccgctgttgctgctcggggtgggcggcggcggaggaggccgatgatggccgcggatggtggtgggggggggaaggaccagacggtggggctgcgggtgtcttgacgatgggagaggccgggcgctgggttcctccgaggtcccctcgcggaggttcaggctcttctgtacaggacgcacgccaggcaagctcgcgccctgcactcgctccaagagcaaaagctcggctagaccaggtcaagctagctcggtcgactgcccgtccttacctcgggacgcgtctcggctccccctccccgttgccacccttccctcctcccctcactagccccagacgacagcacgcaagcgaaccgagcggagggcgcaggaaacgtacgtcggcatacgggatattgacgttgatgacccgatcggtcgggcgcgtgatgagcgacgtcggccggtccaggctctggccacggtcaaggaagaggggggggggagggaatcgcatcagactgctgctgctgttgctgctgctgttgctgctcgtacgaccggccctagccagccggcctcagcgggagcaggaagcgagcgcacctcggcaagcacatcaggcgccgaactcggcccttcgcccagccgcgtcgtcgagctcgtcgagcggatcgccttgcgctgctcgaggccggcgaggttaaaggcgtcctcggccgccgtgtgggtcgtgtcgggtgtcgactggttgtcgtcttcgtcagacgaggcgtacgaggccaggagggaggccatcgtgcagttgcggttggtgcgaagagaccactgagcgacggcggacgagacggctaggcggagcaggctgccctgacacaatgcattgaccctgctttatgcatcgtgcccctttcgcaccgccctcatccgccctccctccctcaaccccccccacaagcagcagagagcctagcgatccaaaacgaatagcgcaaagagcaaagcggaccacccgatccctctcttgaagccccccggccggccgtaagcgagtcagtgaacagccagacgggcatcgggagtcggaaggaactgcaacgacgtctcgcgctctgcctgccgctcgcgcgccacgttctgcctgcctggccggtttcgacccggccgagctaaagaagctcttgtccgagctgacgcgagccgggagggaagtagataaagggaggaaggcggtcatgctggaatgaccaaggcaagaagaggggcagaagaggcgaaaagatcggtgaaagaaaaaggaaaagcgtccctaaggggctcgccctcttcaagcctgcgcaccggcctgctgctgctgctgctgctgctggccctccccctgcgctgctgcccgcttctcgcgccgaaactcgctcacggccgcgtcgtaccgctcgagcacgtccacctgcttgtggtagagctggatgttctcgatctggatctcggcgcccgtccgggccgaggtcgtccctgggagcgaggacttcttaagctcggcattggcagtcacgtgcaaaagcgagctggcgtgagcgagaggcggtgagagggaaagtcaggacggcctgtactgcaagcgagagcgtcgaaacgcgcgcaacgcgagagaagggaggaaacgcacccaaccggcacgctctggaacaccttctcgaggtactctgcagacttgttgaagccgaccacctcgaagaaggatgacgtgcgctcctcgtcggccgtgaagacaaggttgccctggcctgcacaccggggggggccgcccgtctacagttcgaggtagagaggttcatggcaatcggattgagagacgagggcgtaagagagggtgatacaaggaggagccgggaggtgtcacaggcgacggcaggaggggacgggggcgacaacagcgtgagggagaaccgcagaaggagaaaggcggggcgaaagagagaaagggcggccgagagcaagcagcgtcgggacacgagcgagcgagtgagcttaacaggccagagagcggccttccttcacttgacgtacttgccgatgacggcgtcgggcgcgtagcgcgggatgactgcaggcgaggggcgagttggggtcaactaagcggtcgagcgaggactccgagaaagaggcgacgcacccttgcggtcgtgaagcatgtcaaactgcaggagaggggaggaaggaagacgtagaacacaagtcagcgtcaagcagtttgcacgagcgtacgacgagcgagtgacgcacttcctcggtcgcgtctcggccggcgtagaggacgagggcctgctcgccgccggggtgctcgctgcaaggcaaagagaaaggagcgcgcgtcagtcgcggagggcgcactcaagtgtcgagaaaggaggaccacgtacgcggcgaacttcgtcacgtccaaaaccatgtcgtccacgatgatgaacatgtcgtcccgagtgttgtgcttcgcaacttcctcgagcgtgtacgtcttgttgccgtccttcttgccctcgggctcgcccttcttcgagacccgctcagccggcgacgagccggcgacgagcttgtcgccctcgttcgggtcgatgccctcctttgcctctgccgagggcgccgcagggggcttggcccccattctcgcccgcaggacgtcctccccgaccctccttggcgaactgaccggcttcaagctctcttccgacggccaaacggccctgatcaaccgcagcccgcacgaaatccagctctggtccttcgcacggcctgaggagccacagctcgttcggacactgcatggccattcgcaggcgcagtattatgtgcgtgcgtgctttgcaggcgtcgacgatgggctcgttttgtcggggagcgaaggtgccgtcctttctctcgcccgcccttccctttgctgcttcccttgaaaggtcctgacgcaactgccgtccccttgcccggtgcagactcaaacgtctacgtctggcaccgccactccggcgaactgctcgaggtcctccgcgcccatgtacgaggcgccgtcaacgccgtcgcttggcggccggacagcaacggcgagggcggcgaggatgaaggagggcggcaggcgatgtttgcgagcgccggcgacgacggatcggtgtgcgtccttcccttccttccttcctgccatccccttcgttccgtcgtcctgctcacgctgacttttccctcctcccgcccacgcgctgtgcccagcatcttctgggagccctaccctccaggggccgacctacccgagcgcgatctctccggcgcgaggcagccccactcgaccgtccagccctgagctcgcttcctcccgtctagctgcccccccccccttcacgtcctgcccgattggcatgccatctttccttgtccgagagagaagaacacgtcgtcaaagggcataagatcgttaaaaaagcaacgatgtgggaatggggtgttgcggtgcagatgagggccccccaacaccccgcggatgctccccagccatcagctcgctcatcacggccccgctcggcgagctctacggccgcaagccggtcgtcgccgtgtcgtttgcgctctttacactcacctcgatgggcgtcgcgctcgcgccaaacgtcggcgcgctgcttgcgctgcgcttcgtctcgggtgcgtcgcccctttcgcctttcgtcaagcgtcgtgcaagcgttggccttcttcgctacgctaacacccctccgctctcggctcgagcgatgtcaggctttttcgggtccgcctccatgtcgcatggcccagcgatggcctccgacctcttctcgccctccgacatcgccctccccttgactctcgccggcgtaggccggtttggcggcccggtccttggcccgctcatcggcggcttcatcgcctctcgcgcgggctggcgtgcgctcggctggctcatgatggccttcagcggcagtctgacgatcctcgccgcgctcgccgtgccagagacgtatgcgccggcgattctgcggaagcgagcgaggcggctcgcgaagagtcttggcgagagccatgtgacgacgtatgatgccgggagggtgattggcggctggcgggacgagtgcaggctctacctcttccggccgttcctcttcctgtgaggttgcaccccctttgacttacggctcggccttcggccccggctctgcctgtcgactggccaggctgatgattccgtcccgctgcgcttccctcgttgttggcgtccctgaaggacgcgcgagcccatcgtcctcctcctctcgctccacgtctcgttcctctacggcatcctcagtctgtcccccccccaacacgccactcatgggtctctccctgctcggcaatctcgacttcctctacgcgcacgcctcctacccttccctctccctctccaagctcactaccggctcccgccaacgcccaggcgcaatccttttgttcgggtactcgttcaagggccggacgtatttgtcgttggggtgggacgagggaggatttgaggcgggggtggtggagaggctctgggacgagatgaacgggttgaccgagaggctgctcgtcggttaggacccccccccgctactactctcttctcttctcctttccctcctatcttgacgacctctcatctcttccgcctatggcgactctattcgctttcaacccatctgcttctcctccctctgcttccctccaaggacccttctcctcgcacccaggctcatctagtctcccctccctcacgagccctttctggtcggccgcactctgttctacaactcgtctagcatgcccctcctactgccgacctccattccagtgcgttgtcgcggcacggtgcgtcagggtgcggtgcgtcttaccgctcgcgggagagcgtcgccgccgtggtcggcgtattctttgtcgggtccgacacacccaatgcgcgcgaggcgagcgtgctgagtcgggtctgattgaagtaagggggtctgtgagcgcaacggcgccgggggggaaggaaggaagacatgggacaggggtagggtcagcacccgttcttggctcctcgttctccacatcctagatgagagtccacctatgcagacaggtgtcaagaaaagcccatcagtgtcaaccgcaggcagtcgctgcatcgcgttgcacacggttcagcttgggctaagaaggggggagcatctcgagctggctgcctgcgcgcgcgcggtcgaagctagtcaagggaggtgccggtcgacccatccgactgcgaggacgcccgcacccaagatcgacacctacagtccgtcctggcagcccccagccgaccgagagagagagaggcgagagagagagcgtcaggcggtatacgcactctggtgatccgccctcggtcgcgtccctcaccgcctcgagcagcctcatccccctctcgagcacatacccgggctcgtcaaacgccccttggccctgtagctccttcttcttccccttgcccgctgacgctgctgggccaccggcgggagcggcgccctcagccgactcgcgcttcgcccgcttgcgaggggcatggaggatgagcgacgggtcgagcccgtgcttgcgcgcggcggcggtcgaggacggctgctcgagcgcgggggtgggtgcgacggacgagcgccggctgctggtggtgctgccctccgcgtcgggcgtcggcttgatgtcttggtcttcgaccatgtcgaggtctactgagatggatggcgagagcgagcgagcgacggggaagaggtcgagggtcgaggacgcgttgctcgatgcaagacggcggccagcgatgcagacgagtagggtcatcagtcgagggacggtcaaggggcatgcgcatctcgcgtcggggggcgcagagaggaaagacgtgagatgggataaggcggaggattagggagcggacaggaaacgtaaggagagactgaacgaggcatgacggccacctagcgaaggggaggggggggacacgtctggaaaggggagacggccggtgaggagcggtcgagcccgccttcctgtgcaaccatcatcgtcctctgccgccccctcgccctctcgtccatctagaagctctctaccgtcctctcagagaccatgcgccgctccctccgcctagtacgtcgccttcgttcgctcctcgctcgctcgctcgcccgagactcgccggcttgaccgattggatgctgcgctcgcgcccctcgacttcctctcggcctcccagcatcgccagtaagcgcctaagctgccggtcgagcttcagcatgaggtcttacaccacactgcccagtacgaggagggtgggccctcgacttctttgtccgaggcgtttctaacagagctctgtctcgtgtcaaagacctgggcggtgcgtgccgagcctcttacgccggttgtgctcgctctggcagcagagactgacccgccatatcgtcttcaggccgagggccaacgcctgctctaccattacatcggttcctccaataggtcgatcctcgacagaccccaccttggccgccttgtcgagacgatcgacatgggatgacaagacagcagaccaccatttgctttgctgccgaacctcaagcatgtcaaggggttctgtgtagactggcaaccaccagcaagcgcagagagcgagccaaaagagcgattccggccggcgctttggtcgttggcggcctggtgggaggaatcggttctttggcccgaggcccttcccaccatttttgacctacgttagctccggcgtttcgacatgtaccttacaccggaagctactcatacggtcaagaacttgatcggatctcaaagcatcagcacgctcgaaacgatcggctcttacagcagagcggcgatcattttttccagtttttcctggtctaccgcaaacttgcggataccgtcggccagtttgtccaccgccatcggatcctgattgtgctgccagtagaattcagactcggtcagtctggccggacgcgctttcacctcgccgctgtatgacagtttacgtgccacgtcgccctggctttctgccagttctttgagcagcggcggcgcaatggtcaggcgatcgcaacccgccagttccagaatctcgccgacattacggaaactggcacccatcaccaccgtttcataaccgtgctgtttgtaatatttgtagatatcggtcacggagacgacgcccggatcttcatgcggcgcgaactctttcttgtcgctgttggatttgtaccagtccaaaatacgacccacgaacggggaaatcaggaatacgcccgcttcggcacaggcacgcgcttgagcaaacgagaacaacagggtcaggttacagttgatgccttctttttccagctgctcggcggcacagataccctgccaggtggacgccaatttgatcagaatacggtcgttgctgatgccggcatcgttgtacagtttgatcaggtgtttcgctttggcgacgctggctttggtgtcataggaaagacgggcgtccacttcggtggagatgcgccccgggatcaacttgagaatttccagaccgatattgaccgccagtttgtccgtcgcatcgacaacctgctgctcgcgcttgtcgctctgcgcacgggcccaggccacagcgtcatcaatcagcgcacggtattccgggatttgcgcggcattcagaatcagggccccccccccgcgcagatccacatcgaagaaggcacaatggtctgcccaaactgcaagcacgagtaccccatctcgaacgggatcccaaacatggtgcgcgccccctcctcctcctccccttgtcctccttcggctggcatcgtgtcgtccttcgggagcggcttgtcccttggcgcgtacggcggcggtctgtggctccgaggggtcatcctttgccggtcgtttgcgctgcacataattgctgacccttcctcccccctcccctcccttccgctctcccatcgcagctgctggccgagcacgagatcctatgagcggtcgaccattgactgcggcgcgtgctcttctgcgcagacggggcaggggggccggcgcaagctgtgaagagagggagaagatgcgtgggctgaacgcgttggaccttttgctgactgacgggctcacagaacattggaagggccgtcagggagccgaagggcccaattggacgagttcctcatcaagatcactcggatgatcgtcgtccgggcctggtgctcaactcgccaagccgcactgcagcgaggttgtcacactcctacgctcggccctctccttgtgcgcctcgcccgctggccggcgcgcaacagggagagagggcctcagggcgaactcgccccagcgagctcttcagcgaggaggtacagctgggtgatccgctcgcgctctgcctgctgctgctggcgcctcgaactccgacctgcagcactgcccgctcctgcaagggctactgctgctgctgctgctgacgacgggaggggcgggcagtgctgcaggtcggagttcgaggcgccagcagcagcaggccggccgcctgcgactggagggcgaccgaggcggtcgaagcccgcgagaccgaggcctgcgaggccgtgttggccgcgcagtcggcgttggccttgccgatgcactggttgtactggtcggtgcagtcattgtagtcgaagccccaccagttccaccaggtccaggtgacggcggcgttgcagagggtccgctgcgagttgcacgagtacgacagggcggcgaacaggtcgttgaaagtctggccctcgcacgtgtagcggtacgactggtaggtgtagacagaagagcagtacttgccaccaagcgcgccctcccagttctgccagtcgtagccgctggagacaaggacggccttggtaggcgtagcggcggcggcagcgaccgaggtgcggctgacggagctggagaggttggaagaggaggtcaggggctgagctggagaaggaaggacgatcgctcgggaaaccactcacgcgaccgaggcgaccgaggcaaccgacttgaccgaaaccgacgagacggaggcgaccgaagcggtgtaggcggcagcggcggccgagccatcgtcgcagctgtagagccagccgcagctgcgagaggcaaggacgatgagagcgagtcagcagagggtcgcggtcgagcgggaggcgagaggcaggcgacgtacaagagaccccaggtgcgcttgtcgagcgcgtgctcctgcgaggcaggggcggcgggcgcggcgacggcgaccgaggcaagggagagagcgggaagaagaagggcggcacgcatgacgaggggtaaggggtttaggaggacggcgaagggtaagagagggcggaggggggcgtgtgagggcagaggccagcgacggatgcggtgacgagtgtaggggcacgatgggcgggcggcgatgggagcaagagtggccgttgcaggccagccgccaagcagcggctatgacagtcgacagcctgtcgtcggttgccggcgaagaggctgctatggtggctatcgtgccctcacaacctggcaagttggcacgatgaccaggaggtgagtactacgctatcatgggcttccctccaggactgctctgatgctgggtctgtgttgcggctggacggacaattgatgggctggccgggccggtgcctctgctactgcgccctccgccggccaacacgcaccgacacctgccctgaccgccctctcagtccttaccatgttgctcgtcctcagagttaagaccttcggatacagagggctatgattgttgccctggtggtcgtgcaccctgcatcgcagcaccggtcgatgagacccgacctctctccctcctccctcccttgaacggagacggtctccccctccacccgcgcggctgacagcaacaacactgaaaagggctggttcaagaggctcatccgagaagacactaaggggcggcctcagatcgtcgtgtcgtaacggacaggagcaagcgtctgggggatgtttccctcgcgcgtgatcttgtgggcggcacgggggagagcgggaacccgcttgaggttgatgaactctcccttggccttggcctccttcttgagggcggcgttgcgcttaacccggtcaaggaactcctgccggcaggccgagtgcttgacgtgctcgacgcggaggttgacgcgcttctccatgtagcggttgccaacgaccttggccatcagtgaatggtcttggtcaccaggcgaggaagggcagagaggagggggggggggaccgacagtgcgaggcctccttcttgctcccttgcttgcccgtcagccggccaagcttcccgcccgcccattccatccacgacttgttctcatcgccgttccccttgaacagttcgacgctgacatgggccgtaaagtcgggccacttgtggtcaaacacgccgagggtcgcaagcatgccggcaagggtcgtgtcgtgcgttgcggcgaggaggaggcgcggctgggaagcgggggaggtgacggagctggagagggaggtggagaggtcggcgaggagccggcccatcgcgagcgtgcggaactcggaactcgtgttgtaagcaccgaacctgacggcaagcaaagagccgtcagcctgagcgagggagggagaggaggtggagaggaaaacggaccactcgtggcagattgcattctcgagcgtcgcccgtgtctccgggtcgtcgaactccttcgggactttcagcccattcgcctcggccgcccttaccgtgtccataattccgctcgccgccgggcttccgtcgatccttatcggcttcccgtcagtgtacttggacagccgcttatcgagcggccgcagcgtgtcgttccatgcgagcgcggctgcgcgggcaaactgccggtcgaggtctttgagccgcttacagctgaacgtgttgggcaagagcgactcctcggtcatgttgcggatgtggacgtcggcgcggaaggacggcggccggtgagcgagagggtagaggccgacaatgatctgctggagcgactgcggaggggaaatagttgtctccgtgtgtggactttgaatttattttttcttcaaaagtgcattacccttaccttttatctcttcaaaatatttcaaaggtataataaactatactctttatatatgttatagggaaaaaattcaggctgaaaaaaaaatcgactcgctcgactttttcttctccctccctcttctcccctcttcctcttctcccctcttcctcctctccttccttccttccttccttcttcttcttcatcatctcttcttctttctttctttcctccaatttttctcttcgaattagcaagtctaattttttgcctaccaacaagaagagaaaaatgaaagaaaataagatgatggttccttaatggaacaaatcttgggaacaaaggcttaatctcagcagatcgtaacaacaaggctactctactgcttacaataccccgttccacattaaagtcgtatgcaatggattcgattccgcacaagatttcaatggaatttcatggacaagtcaataaaacacttccgtttcatcaaccatcgcccatcttctacgatacaggagagtaggaacaagtcctacctctatttttatacatataaatcatgcggaccaaaaaatcgtcgctttctggcacggattctggcttagaggcgttcagccgttatccggcagatgatagctccgcggcattgccttgtcaggcagccgcaaataccaatgatctgaatcaacggttcctctcgtactaagttgaattaccattgcgacgacacttcatcagtagggtaaaactaacctgtctcacgacggtctaaacccagctcacgttccccccctttcccacctctcgcttatccccaggaccccgcgcagcttattgcccacttctatcatttcgccgctgagctcgtgttcggcctctggcggacgacggccgccctcttgccacctggcctgtataacgcccgcggcgagctggccaagggcaagggctcgcgctgggtcgagccgatgaggctcgtctggccgcatgttgctgaggatgcgtggcgcgactattcggggatgaatgcgttgctcgttcgtcccctccttctctctttgactcccttcttcgctcgagctaacctctttcttccttcgcgaccccatccgaacagatgcgcgccgtcctcccccagacaaccgtcctctcctcgagctccttcgcggccctctccgtcccctccgccgcggcaagcgcaagcgaaggccgcttcaggccggtcgtgtacgagcgcgccgtctttgccgaccgggcagcggcgatgcgcggcgagcgcttcgccgatacgggccggacggccgcgtgcgtcttctcgctcccttgatcttacctcacccggcttccgtcagctgacccttctcacgcttgcttctcccttcaaagtgaggcattcagcctcccgtccacgtcatactggtgggcgcctgtccgccggcggatgctcgactttgttcggcgcaagggtctcgaagccggggagacgacgacgacagaaaaggcggcggttgacgtcgtcgtcaagacaaagaccaagccagtcgtcacgtacagtcggtactccatgaccttttcagccgctcacgtcctacccccctgactcctctcgctcccccccccccctttccccgggccctctttgttcgagacaagaggtcgagatcctgacctgctccctcccctcctccccttctttggtgcgcgcgagtagcgctttcaagtcgctcttctcgactgtcatcggctcaacattcctctcggcctgccttattgccgtcccgctctgcgtccactacctctgggagcgcaaaaacccgaccgagcatcggcagtacgtttcggtgagtgttcgaggcccttggcggtccctgatctttcgggggggaagcgccctcttagtgcgaggtcgaaagccggtcgcgcactctgctgacgtcctccccgcgctttcgcctccaggacaacgtcggcgcctggttctattttttcgccttcaacgtcctcgtctcgtggtacctcgctgtcctcctcgacctcctcccgctcgcggtcgtcgccctcgtcggcgccgtctggggctcgatcaccgagtcgatgaaggttcacgtcgagacctatggcgtcgtcaagggctggatcaagcccatcttctatgcggcctcgatctggggctcgtgggccgtcatctttcagcagatctacggcctccactcgaaggccgacgacgtgccatcaagggcaccctacacgcgacgcgtctgttccccttctccccttctgcttcccttcttcctatcgctgacgctggtgcgcttcaacagctttaccaggtgatcgaattcctctttttcttgatgctcatctactgcgtctgcaagatcctactgcagttcatcggtccgtcccggcgccctttttcccaccacccgacgccctcctgacgccaaaagaggaggaatgccgatgcagtccgcgcgtcaggagtgcatcggcaggcgcacggtcgccagcgcgcgcgcagccgcctgctgccgccgctggctctgcgcgccacgccgcactcgtcgcaacttcaacactccctctcgatgagctgcatcgtctgctttctctgctccctctgattccggctgggagggggcgagaccgtgcccccggagacccataccgaacgagaagaactgatgcttcagccgacctaggagctttgtccccaagtcggccagcatctggttcgttggcatcgacacgataacgaccgtgccatcctcgaccttgtcacgcgtgaagtgatgacggatgtcaatgtgcttcgagcgagcgtgcgagttagaattaatggcgagcgctcgggcgccccggttgtcctcgtagaccgtcgtcgggccggtagggagaagccgcagcgacgccaagatcgaccgcagccagatcgtctccttgaccgcatgagccagcgcgacgtactctgcctcgcatgtagatagtacgacgctctcctgcttcttggatgcccagctgatggcgcccccgttgagcaaagagacgtaagcgctgtgtgagcggcggccgtcgatgtcggccgaggcgtagtccgcgtccgagtagacctccaacgtcgatccgtttctcccgcccgtgcggtaggtcagggcccattccttcgtcgtcacgagataagcgagcaccctcttcagggctgaccagtgcgtcttgccagggcaggccgcgaattgggccagccggacgacggcgaaggagaggtcgggctggatattcattcatgtattcgttgaatgaatgaacgcccatcgaaggatggtgttgtctaccggagaaggagtgtttgtcaacatgatgaccatgggtttcttgagtttgatcactagaagtaaaacgatttgccattgcagtggatttgaagaaattcgattagtcaattagtattggatgaaattcgatttcaaattgatttggatttggattggattgaagttggattggattggactgtcaataacaaatttcaactcaattggttattgtttgttttgttattgttgttgttaaattgtcagtgggtgggtaatttagtttaacttgactcgctgatgatcaataagggtggatatgaatacgattcggtatttgttattacgaaggatgaaatatatatgtactgtattttgggaatggaattttcactcttagtgcccaaccttctattatatctccttgctgtggccaaatgtcatacgtattgggttgctacattgaatgtaagtgtgccttactcgtcctttcacccgcaactccatcgttatccagcatcgtcatccactgcaatcgtggcgccaacctcttcacttccaccacccatatagcatatttccgtgagtgtgtacctcggcgagatccgttaagtgggtttacgcaacaggccaagaggagaaggagggtttggtgataaagcaatggagcacacaagtaagcaggacgaagtatgattgatggatggatgaaggaaaagaagagaaaatggcaggttgggttagaaaaggctgttcatcccgtggtatcgcagtctcaagtattataagagacagcttacgaacagcgcgaccttacccccgagcaagccgcccagcgcctgcgcgactgctcagacgtgcactacctcgagcgaaccgaggagccggcggccacgtcggcggggaggacaaactgaaacctcaagagtggaggggcgggtgcacgttgcgctcttcctcctctgggctctgagacgcggcgagtgtcggaacctttagattggaagattgaacaagctcggatgtcgtggtgttgggccatcgagggggcgtgcgacgagtgtctaaggggttgcgcgcggagcgatcgccgagggagggggttcaaggggtccgccaggtcgcagtcgagcggccggcggtgttgagtgtaggtcgggccgagctgcgtctcgtcgtgggtcggccgaggagagacctacttggggcgagagtgcggcctctatgcagatgttgcacgcccgcttcctccaagtcaacgccttgccgcccgagtgttccgcaaaagcgccgagctagacaccccccacgcaccaccttctcacatccccttccggatcttggccagcagcccgtccatccggtcgcccatcttcggttgcctcgctcggccctttgcgtcctttgccggcgcccagcgcggcggcacctcctggacgaccgcttgggtggcggcggggcgagctcgactgctgccggctgtcgtcgtcgtcgtcgtcgtcaatgccggagagggaccggcgggcgtaggcgtgtggtgaggtctgtgatggacaggtaggggctgacgggtgtgtgggcggtagacggccgttgaggaggggtggactctgcgcttgctcgcacccgtctcgcccagcagtctcggcatcggcggcgccctctagcggtcccatgaccctctcgtctgggtgcatgaagggcacggcgtcgtcatccttgcgcatgcctgccggagttccgcccggcgcaggggaggtggccagcgacgattgccggacgacacgggatggaccagaagaggttgttactcgacgcgtagggcgtgaagcgacgctggcacgaccgtcttggcgcctactgacgtcgctcgccccttctcccggtcgatgcggaaatgagcgccctgcccgccggccctcgcctgctgctggggagtacaagaggcgagccctctcttgccctctcctcctccttctctctcatcatccctcttttctcttcctctttatctctcaccctccaaccctacccgctcaaccaccactcgcccgccatgaagttctctgccccgctcgccctgctcgccctctcgctcccgatggcgttcgcctcgcccgtcgcccgcaacgaggaggtcaagaagtgcggcctctctctccctctctgcactgtctgcccttatcgctgaccgtttctacctcttcccttgtaggcacgatgacaagaaggacattgagctgtgcgtcctctccctcgcctctctccctgccggcccgcctcgcgctgaccgcctctcacccgcccgggccgccggcagcttcaccttcgtcatcaaggagtttgagctcgtcaagaccgtcatcgacgtcaagaaggtcggcgactacggctaccactacgacgacaagaaggacgtcgacgcgggcgcacagcgatgttgactgtctgcgcgcgctgtcgctgttttgcgtgctgatggggcgctttggcggcaatctggcgctgacgctcggcaccttcggcggcgtctacatcgccggcggtatcgtgccgcgttttctggaattcttccgcaactccggttttcgcggcgcttttgaagacaaaggccgtttccgcgactacctcgccgacattccggtgttcatgatcacccacccgcagccggggctgctgggcgccggcgcgtacctgcgtcaggcgctgggccagaccctgtaatctgttctcgtcagcggtccggtaacgtcacgttaccggaccgcctgcgctttcattcgcagaacaacagcatttaccgcggcggccagaacggttcgcccagcgtcagcatcagccggttggcccaggcgaagaacgcggtggactgaatcaggtcgagaatctccagcgtgtccagtccctgttcgcgcagccgcgccagatcctgcgcgttggtctgcgacggcgtggtggacagccgggcggcgaaggtgatgatcgtctgccagcgcgcatcctgcccggcggcgagatcaccgcccggcggcacgtcgagcaggtgttgtactgcatcgtgctgtttcgacaactggctggctttgcgggcatgcaccgaggcgcaataaatacagccattgaccttgctgaccaccgcggcggccagttcccggtctttgcgcggcaggccgccggatgtatagaacatccccttgtcggtgagggtgcgttgttccagcaccggcaggttacggcccagcaggcctgcccgcgcgcggttcagaggaggcaccagggcggacgaactgctttaagtaaagctcgtacggcccgagcaggtcaatgagcgagtcgatcagcacgtcggcgatcgtcgagacgaccggatgcgactcgatctgcctttcctggagcctatacaccattcttgaatgcctcggaaagatctctgcgaggttaaaaaaagtctcgcggatgaacgcctggcggccttcggccgagttgagcccgatctcgtgcggacgggcgtggtacaggaggggcgtgaagaagccgtttaggccggcctcgaggtttcggacgtaatccatctcggagcggaagatctcccagagcaagccttggcgctcggccgtttgcgggtcgagcgaaagacggacggacgatggaacgagctcgtgccattcgagcgaagaggggaggaggccggcttgccattggcggagctgctcgaggatcttggtgtgtgcttggagttcgagcgcgaaggacgagggcccggcggcggttgatgaaggcggagaggaggaggaggagggcttggcgttggagccgggcgggaaagactgcgctggtggtggccgggccgagacgggtgagggttgctcggagaggggcttcgagtcctggggcgggggcttgaggaagagaagggtgtcgaagggcacaccatgtaagccttctcgcggtttcgggtcttgcaatgagagttgaacgagggcggctcaccgtgtgattatatgccgcctgtggtctctcctctagcccgttacgccccccgcggccgctcctcctccttccgcggcggcggaggcggtggggcacgtcggatgagctccaataagcgtgacgagcaaccgccgctcccacctccatcaccgtcttcgtccggaccgcctcccacctcgtcgtcggcggcggacgggaagtggacggccccgggcctccctagtgccgttccgctgcctgaagtccggctgccctcccagggcgatgagcaccgctcgccgaccccgcaatcgttcacgactgctcggtcgtccgctccgtctccttcgccgtctgctagcaggggcacgacgccggtagccggggagcgcaacgccggaggaggaggaggaggaggcgcacccccaccgtcgtctctccgcccttctccaagcatccaagccggccccgccgacgcgtcgaggtcgcccaagccgcccaagccgccgccaatggccgttcaaacatccttctcgcgcgagctcctcctttctgacaaccccctcacaccgctcgcaccttccttcgaccccgacggcggcgatgcagcagcaggcgaagaagaggaggaggaagacgtgattcttgcgaacgtcgaggagatgctggacgggtgggattggcgggcaatgatgggtctcgctccctccggcggcgctggcacgggcgagggctcaacgtctgacggcgcgggcgggctcgaaggcctgtttgggtttggggggtccgagcgactcgggcagggcaaaggcaaggactgggagatggagaagcggctcgcggatgagctgagcgctctccaaggcgttcgtccctccctccttcccctccccctttactccgtatctgccccagttgccgggccagcgttttggtgggaatgcggtggatgctggtgccgtccagcagtacgtcgcccgccatcggtttcaacaggcggcacagcgcacgcagcagggtggatttgccgcaggcattggggccgatgatcacgctgaatttaccggccgggatcgccacgctcagatcccgggtgatgattttgttgtcgtagcccagcgttaattgctcggcgtgcaaaaggtgtgtcatcagggtcactctttacagacaaattaaacggtgctgattaccgacgtgattcacggatcagcagccagataagatacaacccgccgatgctgaccgttaccgaacccaccggcaactgccggccggtaaacagatgctgggcgacaatatcggccgtcagcagcagcagaccgcccaccagcgcggcggcgcataacggcaccgtgctggcgcgggtcaggcggcgcgcaatctgcggcgccgccagtgcgataaaggaaattggcccggcgctggcggtcaccaccgcaatcagcacgatgccgcatagcatcagccacaatcggctggcttcggcgttgacgcccagcgcccgggcactgtcgtcgcccatttccagcaattgcagacgccgggccagcagtagcgtcgccagcagcgtcagcgggatcatcagcagcgcgggcgcggctttactccaggtcatgccattcagtgagccggcgccccacagcgcggcggtcatcaccgtttccagcgcgccggtgatcatcagccaggtgttgaacgccgacagtaccgcgctgaccgctggcgatggcgaggcgggggacttggggtcgctgctcttcttggtgtcggcggcggaggaggaggaggaggaggaggcgttggctttgcccttgacggcagcctgtttcgcctcgtactcggctatgacagccgcgacctgctcctttgtcggcttggcgtcgctcaccgctgcccccgcccccgctgctgctgctgaaggtggaggtgctgcgagtgcgctcgcaaagttgcggtcgagcaagtgagccgggcagacgtagaggaagtctgctttgtcgagcgctagcaagccgagcgagagggagggagggagcagtcagcctgaggcgagctcaggcgcagagagagaggggaaggacggactggcaaggactgttggagtttctttgtagcacacccagcaaggcttgggcgtcccttttccatcccgaacgagaccgagagcgcaaaggggctgtcagcgagatgggtcgaagcgcggcggagggcgggagctgcgcctgagccctggctcaagcgagcgggcacaggcaggcgatgggggaagaggaggggacgaggacggacctgccgtccgctgatagtagcggttctcgaccttgggttgcgggacggcctggggcggcatggccttcaggtgatggtgaaggaggaggaggacaagacgggccggccgacgaccatcatctgctcgacctcgtttgctctccccttctcttccttccttcaaatacgatggcacccaagatggtccgttcctctccaaggccagaccggcctcaggactgacccgcccggcactcgcccgcgtcaggtaacatcaaatcgtaccccaaaccgacacaggtggtcaggtagagaataccaaggcgcttgagagaactagggtgaaggaactaggcaaaatggtaccgtaacttcgggagaaggtacgcccttttgggtgagggcatttactgtctgagcttaagacggccgcatagcccaggtggctgcgactgtttattaaaaacacagcactctgcaaacacgaaagtggacgtatagggtgtgacgcctgcccggtgccggaaggttaattgatggggttagctaacgcgaagctcttgatcgaagccccggtaaacggcggccgtaactataacggtcctaaggtagcgaaattccttgtcgggtaagttccgacctgcacgaatggcgtaacgatggccacactgtctccacccgagactcagtgaaattgaaatcgctgtgaagatgcagtgtacccgcggctagacggaaagaccccgtgaacctttactatagttttgcactggactttgatgatgactgtgtaggataggtgggaggctttgaagtgtggacgccagtctgcatggagccgaccttgaaataccaccctttaatgtttgatgttctaacgttgacccgtaatccgggttgcggacagtgtctggtgggtagtttgactggggcggtctcctcccaaagagtaacggaggagcacgaaggttcgctaatcacggtcggacctcgtgaggttagtgcaaaggcataagctagcttgactgcgagagtgacggctcgagcaggtacgaaagtaggtcttagtctctcgagacatggcatcacaggctgaaccatctcagcttggatgccgtgaggaaaatggcgacgggcgctgcaaaggacgtgcggttgacgagtacgacggcctgcggaggtgtctgcgaggcgtgtcaactcggcaagctgcatcggtcgcccttcccgagctccgaccgcaagtccaaggacccactggagcttgtacacagcgacgtagttgggcctgtcaggcctgagacgaggtcagggaagcggtacatcgtcaccttcatcgacgactacagccggaaggcgtggacgtacctcgtacgcgagaagtccgagacgtttgaggcattcaaggcgtttcggacatcggcagagaagcaatctggtcgatcgatcaaggcactgcagtcagacaacggcggcgagtacacgagcacggcctgccagacgtacttgaaggagaccggcatccagcgacgcttgacggtcccgtactcgccgcagtcgaatggcgtggccgagcggttcaatcggacgctgatggaagccgtacgctgcatgctgaaggcgtcagccctgcctaacagcttctggggcgaggcggtgatgaacgcgacatacgtcttggctagggtaccgcatcgagccctcgggggcacgtcgcctcacgagaagtggtttggccagacgccgtccgtcggccacctacggccgttcggatgcgtggcctatgcctgggtcccgtcggagaagcggacgaagctggacgacgtcagccgacggtgcctcctcctcggatacgcaacggacgcacgagcctggcttcctgcactacccattcagagagtggacgcaaatcattcatcagactgcgccagccgccagtcccttctaccacgacatgatcgactttttcggtcaggtttgccaggccgtttgaaatgagggtgtaattgattgggcaactgtgcgccacgctactttcttcttcgcttaacgcgataggattaactgcttcataaggcagttcgatggttgaaacactctgcaacaccagggcatctttattacgcagcccttcgggtgtctctttgctccccttcgctacgggtttatatcccgcaaccgtttttccctgggaggctaacgcttgtagcaatgcgcgggaaaccaccgttttccctacagaagtgtctgtaccggtaataaagaaacgcttcagcatcactaactccaccgttatgcttcacaaatataaaccaggaaaataattaaccttgaaagtctaagttatgctttcctggcccaaattgagatagcgcaaattttggtagaacagttaaaaaatgttaaccctgcaacagacgaatcaacaaagaaccgttatacatcgcgtcttttaccagtgcagcgcctgccatcgtgccctggttagaaaactgagtactctcaacgctgatgtgctgactatacgcaggaagggcctgctgacggatgctgtctgagatgaccgggaagaggatatctgccgctttacttaacggtgagccaatcagtattttttgtgggttaaataaattcaccatgatggcaagaatgcgcccgacatgcgcgcccaccccggtaatgctcccatccccactacccgtccaccccccgagctccctaatcgcccgattgagcagcacgccgtcccacagcgcatgaagcgacgtccggcggccttggaagaggatcgggtgggcgttaccgccgcggaggaggccagtcaggtgcagaggctggtggaggtcggctaggaggtgggtgaggaagcgaagggggatgtcgctggcggggaaaggaaggaagcgggggaggggagaagggtcagtaggccgctcaagtggtcgtcgttgtcgcttgtcgctcgcccgctctctcgcgagatacgcccctcctctagaaaccgccccgagccccttgagctgcacctcagcgaaagaagccgccttccactatctcatcgacgctcgctcgatcgtctatcccccctcaccctccttctctcttgtcgactactcggccagagccagagcgacggcgagcgccgttcccgctcaactcagccccgctggcaagccaagccggtcggccggtcggtcggtccggcagcgcgctcggctagggctttacgcgcgcacgcacgcacgtacactagaccgacagaccaggaagcaggaagaaagaggccgagttcctcgtgggtcgagaacgacgggtggaaaaggaagggaagcaaaacgcacccctcgccgtcctgcaacgccctcgtccagttgccaattgcctcaaggacgttgacctcgccgttcgcccagccatcgccgccgaaggtgcagttgtcgggcgggacgtcggcgagggcgttgatgtaatgcgatggaccgctgggcatgcggtctggtgcggcggcgtggttttatcggatgacggtcaaggtgacgtgtgactcatggcttgtttttcttccagcagtttctctaccacgccaggatcggcgagggtagagatatcccccagattgctggtatctccggcggcaatcttgcgcagaatacgccgcatgattttgccggatcgggttttcggtaacgcatcggtccagtgcaggatatccggggtggcgatggagccgatctctttgcgcacccagttgcgtacttcggtatacagctcgctggtaggctcttcgccgtgattcagggtgatgtaggcatagatcgcctgccccttgatactgtgcggaatgccgaccaccgccgcttcggcgattttcgggtgtgaaaccaacgccgattcgatttccgcggttccgagacggtgaccggagacattcagcacatcgtccacacggccggtgatccagtaatagccgtcttcgtcgcgccgcgcgccgtcgccgctgaaatacatgcctttgaaggtggagaaataggtctgctcaaagcgctcatggtcgccaaacaacgtacgcgcctgaccaggccaggagtcggtaatcaccagattgccttcgcaggcgccgtcctgtgggttaccgaggttgtccaccaatgccggttgcaccccgaagaacggcaacgtcgccgaacccggtttggcttcaatcgcgccgggcagcggcgtgatcatgaatcctccggtttccgtctgccaccaggtgtcgacgatcgggcagcggctattgccgattttctagcgagcgactgccgcgcccctgctctgccagcccagatcatccgtgccctcccgcccgcctgcccgagtcgacgcttgccagcagcgcgagaagggaggcaccgatcccgatgtccggggtcgaacagcttgcccctctctctccccgaaccctctttggcctttcaagcccctcgagagaccgcgttcggtcgagcttgttaacaggcaagacggccccgtcctctgctgccttcgctcgcccgacgcccaatcccaacacgggcgctgtgctccctccatcgcccgcaatcgaagtcgagccgaccgaccgaccgaccgtctcgtgccctctctgaggagcgaagaccgcccccgacctggctccgaccgacacgtccagcccaagccctcccccagtcagccctagcggtcggccagtcacgtgcggaggggtgcccgttgagggccatcgaggggggagaatcctccagctcttagctgcaccaaaactagcccctctaccctcgccgccccttcgcaagttcgaaacgagcaaagatgcgcgctctcccttctctcttctcgtgcccacaacagtgaccgttgcctcgaacctcccacgcgcaaacgctctcgcaagaaagagagagaacgagagagagagcgacagactcacgaatcttgacgaccctcgcactaacgacgacgccaaaagcgccgttgccgacgactttgcagtttgtgtaggagatttcacgcgaggcgcccgtcttgccgtcttggccggtgacggtgatggtttcgtttgggtcgcctacggcgttccgaccttgtacgatcacatccgctccgtcctgagctcttgtcgtttctctcttcgaccgaccttcaaccccttcagacacacacacccacacacctacacaccctttgctcgtgcctcacgctcgacgcggtcgatgacaagacgtcgttagcctccgtcgttattttcgccccggtgagcgcctgctgagaggcgcgagagaggcgggaggtgcgaggttcgacgggggagagggtcatgtacattagccgcccgggagcagcagcgatagtagcgaagcgcgacagccggccagcagccggtcagagaggaggcgccgtccagagcgtctctgatgcggctctcttgccttgaaagaccgtccgtccgaccagggcgcccccctttaatgtgtcctacttcaagctagagtcgagagagcgagcacgatgcttcggttggtcgctcggtcgaggcggtccgacgcgcgcgtgcgcgaagcgtgcgagcagcaagggctcggtcgcccggtcaggtccgtctgcgtaggaatgggccgggccggactggggcgagcgggtggcctcggaggatggaggacgactggaatgggcagggatcgcgatggacgcgagggagagcttgagggacgaaagagggatgttgtttgttgacgggcgagagagagggacgcgaggacgcgaagagggccggacaaaggcgagcgagcgtgcttgccaatggctcgattcggtggaagccaagctgaccgcgcctgcgtctttccgacccccaaagctgtggtccgagtccccccccctccctgagtgtgaagtctggagggttgttttcagggattgttctataatagtgcccgctataccttttttttttttttcaagcagaagacggcatacgagatatcaagcgacttctcctatcccctgggaacacatcaatctcaccggagaatatcgctggccaaagccttagcgtaggattccgccccttcccgcaaacgaccccaaacaggaaacgcagctgaaacgggaagctcaacacccactgacgcatgggttgttcaggcagtacttcatcaaccagcaaggcggcacttgcggccatccgccgcgccccacagctcgggcagaaaccgcgacgcttacagctgaaagcgaccaggtgctcggcgtggcaagactcgcagcgaacccgtagaaagccatgctccagccgcccgcattggagaaattcttcaaattcccgttgcacatagcccggcaattcctttccctgctctgccataagcgcagcgaatgccgggtaatactcgtcaacgatctgatagagaagggtttgctcgggtcggtggctctggtaacgaccagtatcccgatcccggctggccgtcctggccgccacatgaggcatgttccgcgtccttgcaatactgtgtttacatacagtctatcgcttagcggaaagttcttttaccctcagccgaaatgcctgccgttgctagacattgccagccagtgcccgtcactcccactcttacattgttcgcagtatctaggtacatgttattgcgtgcaccttcatgatgtataatgttattaatgtcaatccctcgcaaatcaacacccccgctccgctcttgcaaccccccttctggccccctcactctctgccccaataaccgatttccaaactgccttatcgtaaaacccccgtgtctgcccgccgcccgtctgcccgaccttttatcacccgacgtcctcctgtcctgcttcctcctccacgaacattttgacggcgataagcaaggctgaacttgtcgatcgcgcgtgtctcgacccccggcctcagcctgaggaggaccgctcaacgctaacttgactgactgactgcccattcccgtccgctcgtccgggcgaaaaacgtccggcgctgactctccgtcgttcaagtacgggagagacgggggggggtcatgaagccatcgccgactccagcgccgccgactcgaccgtcgaacgctcgagcgcccttcgtcgctcgtcgactgaacgccgcttgagccagtagcgctgccattcggccgactgctcttcgacgatgacagctggttcctcgtctgccggcgggggaccgtccggtgcgctagcagaaggagggacaggaccaacaaatgtcatcgccgccgtataaagcctgcttgcctcgcccaactgccgcagccggccgtcgtcgtcgccgtcgctgccggaggtgttgtgctccggcggcgggcgaagcgcaaggaacgctaggaggttggctgcgccggctgctgtgcgacgggcgtttgcgaggaggtcggctgcggggcggacgagcaccccagccgcgaaagggaggcgggtcggagagggcgggagtgtaaaccataatggtatccgtctgcccccagaccgcagatcaccccggccgacacatcggacaggtaggagtgatgacggaagggttcacgtgcgtacacgttggtcagatggatctcgataaacgggatggcgaccgccagcaaggcatcccgcagcgccacactggtgtgggtaaaggctgccgggttaatcagaatgaaatcggtgtttcctctggcctgatggatacggtcaatcagttcatgttctgcattcgactgcaggtgggaaagctgcacgttcagcgttgccgcatcctgctccagtcggctcacgatctccgccagcgtcgtatggccgtatttgtccggctcacgggttcccagcagattcaggtttggaccgttaaggagcaaaatgtgaaacttgtctgccattgtgctgctatctccctcgattggctcagtggcgcacaacataacgcgaagctatccgtttgtcaccctttgccaggcgaaaatctccgctttcacccgcaaggtttgaacattatagccatatcgtagcagttggcagcgaaatactggtcttatctgcggagttaccacgtcgtcattgacaaatttttacgaaatttcactgagaacgcagcctgattcgcgagggtgttaccgattaacggcgccactgacgcaacttcttgtagcgaaaaagcagcaagatgacggcaactgacgcgtaaatgatcggcagtggcgatagcgattttaccgaccaaagataatgaaccggggcgaggatcgcgaccagataaatgccccctttctttccccctccctagatctcgcgtatccgcaacttctacatgcgcaaggtcaagtttacgcagacgacgattgacgagaagctctctggtatcctgtccgagttccccctgctcgacacgctccacccgttcctcgcctcgctccttaacgtcctctacgacaagaaccactacaagctcgccctcggccagatcaacacggctcgccacctcgccgaccaggtcgcaaaggactactgtcggctgctcaagtttggcgactcgctctaccgctgtaagcagctcaagcgggccgcccttggccggatggcgaccgtcatgcgccgccagaaggacccgctcgcctacctcgaggaggtccgccagcacatctcgcgtctgccctcgatcgaccccaacacgcggacgctcctcatctgcggctaccccaacgtcggaaagtcgtcgttcatcaacaagattacccgggccgacgtcgacgtccagccggtgcgtgtgccccagcgcgagacccgccctcgctcctcaagctgacctcgccctctccctctctccttcccgcagtacgccttcacgaccaagtcgctctttgtcggccacatggactacaagtacctccgctggcaggtcatcgacacgcctggcatcctcgaccacccgctcgaggagatgaacacgatcgagatgcagtcgatcaccgcgctcgcccacttgcgctcggccgtcctctactttatggacctgagcgagcagtgcggctacacggttgaggcacaggtccgtccccgcctgccgggctatgcagaaactgagtctttccccctccccccccccccctttccctcatatcctcctccgtcgtttgctcggtcggtcggtcgggcgggcgagtgctcgctgctacctgcctgctcatcttcgaaataaaccatttctcgactgctgaccttccctccctacccctcaaaccggtatcccgtttctttctctctcgcctcctccgcctccgtcaccgccgccgccgctgccgccttccacttgtcgacgctagcctcacaaaacgcaagcagtcgtcgatcagcgccagctcctcgatcggctcaacgccagccccgacttcaaccgcaaccgccgctgccgctctacactcgctcagcgccgtcctgccacccggtccattcagcgcacctctcaatacctcctcctcctcctctgccgcctacgaccacaaacgcccctcctcctcatcggctgtctatgacccgatgcgcgacgccgccctccgcacggtcctccgcaacccccttgcggtccttgccgagcgacacccgctgttcgagagcttggcggcggccgctgctgggagcggcgggggcgagcgcttacgcgaggtattacgacggaggtgcgtttcaactgtttacctcctcttgaccccgccaacgtcttcaaagtcatcctttggcttctcttcacccgcaagagaccggcgtcgctctgcaccccgccatcaaaagccgtagcagcgcgctgacaagccccggtttctccctcctgcccgcccctcccccttcccctgtccctcgctttttcgccttctaagttgcgctcccttcctctgcttccgtctcctcccctcgtctaactctcaaactcctcgcctcccgtccatagacccgcctttgtcattgcatgcccgttacaccctaaaagaactctcaaactcctcgcctcccgtccatagacccgcctttgtcattgcatgcccgttacaccctaaccgtccgtcacgccgcttcggccagctcggtcgcccctccctcggtcgcctcgtcctttagtgcgacctcagatctcgagctcgagccagtcgttcgtcgtgcctctactccggttcgtcgtgcttcggtatcggttgcacccgaagtcatcctgctctcgccgtcgtcgtcggctcaggtcacacccgtttgccctcgtcgctcgtctgctcctcctacgccggtcgactggcgcgacatctcatggtccgaatccgatcgcggcacccctgtacccgagcgtgacgaccccacacccggctcagcacttgataccgaccaggacgacctcgtcgaccgcttcctttcgctcgtccggctcccgacggccgtcaagcccctcatcggctcacaagctcgcctctttgccgacgccgctgaacgcctggcgtctgccttcatcgccaagccctcggacgagaccctcttcgacttcctttgcctgcccaaggtcggcttggtccccggccttcgcgcagatgtcgacctcaagcagcgcctcgcggccttcccggccgtcgactggcccgagcttccacccaactcggcccggggcctgtagctgcacgagcaagagaaaagagggagggcgtcgttggccggtcagcatggacacaaagagcaaaggaggcaagcgagcagagacatactaggcaagctccttgcgggtctcctcgagcttctccttgagggctgtagtctctttgaccgactcgtcggcggcccccttcatcttcccctggacggcctcctcggcaacgacttgctcgacgacctcctcctcaacatgctcgacgaccttgacattctcctcctcctccttctcctcctcctccttctcctcctcctccttctcctccttctcctcgatgaactcctcttcctcagcgacctcgtcctcgacgacagcctcgaccatctcctcaatgtgcttctcgacggccgcgtcggcgacctcttccttgactgcgtccgatagcgcgacagccgtcacttcgaagcagagcgtcctgtaggcaagcagcagcagcagcagcagcagcagcagcagcagcagcagcagcagcatcagggcccaagacggtcagcaggtggccaagagcgagagggagtcgtgaaacggaagacgtactctgtagcgctctctggcgacgacgacgtggccgactcgctcttccagccgtcactgcaaggcagtagagcggtcagtcaagaacatcgccagacaggcaggtaggccaagaccaggggagagcgagagcgaacaggcaggacgtaccgcgacagaccggggaggcgacggaggcggcgtcaacgactcgacctcggcctcgtccgcctgaccctcggcccgccccgcagataagctctcgcacgccgtctcgcgctataagcgccggccggggatggggcaccggacgcgctcgggcggcgccgggcagaaggagacgcccgcgccctcgcgcccagggacaccctcagctgggggcagcaactcaaccaaggcgtttgacttcgtgggcccgccctcaggcggtcggccgacgtcgttgcatcatgggccgtcgcctttgagcgctggcggcggcgtgcgagacccgacggtgacgacctcgcgcgagacggccaatggcgacgactttgccgacgcccccccctcgcccgctgctgctgccggcggccgcttctcgcgctcgcgcctcggccaacggcgccaagcggcccaagcgcgccgcgccgccgcaaaggtcgtctctggcctcggccggcagctcaagcaggtcgcgctcgttggcgtctacggcaagggccccgagattggcagcttggcgtcggcgaggcagctcgcgcgcaagctgtttgataacctcgagcggggccaggcggttgggggccgggcggcggaggagccggtgctcgtcgtcgaagactttatcccggtgcgcgcggcctcctcctcgaggcgcttcttgctctttgcggcacgagagggctgacaatggcgattcgcgcgcggatcgcagtacttccgcaacgaggaggacgcggcgaaggccttcaagcactttgactctgacggcaacggcgacatcagcaagcgcgagatgcgggccgccgttcaggtccgacctttctagagtaataaagatgtttgtagtattgtcaaataagggatcaaatccgacaatcttgatgagactgcttaagtaaaaactacttacaattaattactgacattgagatacgaaggcttagatcgcgaaagagattagatacctctgtagtctaagctgtaaacgattattgctctcccaatctttttgattgggtttagtgaagacggtaagcaatatgcctggggagtactttcgcaagattgaaacccaaaacattagacggtcttggaaatccgcagtgaatcatgttatttaattagataatccgctaaaaatcttacctttccttaaaacaattagttctaattgttgggtattgcatggctgtctttagttaatgtcgtaagatgaggttaattcccattaattaacgaaagccttcaaagaatttgtttttctttgtgttagtgataagctaactttttagagggttaagacaagtcaatatgatacttatggaaagggctatagacgtgatataaaatctaatccaataatttttaatatcgaaagattgaagtattattataatggttaggagatttattcagatttaaatctgtaatttgatttaatgaaggaggaattgcgagtaatcactaatcattacgtagtggtgaaatttatctctgagatgtactaactactcgtcaagcgctgaaagtattaatctcttgaagaagacattcatttgttttccaaaggtgttgtgcaattagtgttaagtcgaaataaggtcgtccgcaccgcgttcattacgtagcccagttcctgctccgggtccggcaccggcagtttttccacgtcggcatggcaggtgaccggcgaggtgaaacgcggcccttcgccggcttcaaaatacagccccagccccatagcgtccggcacggtgagaatatcggaaaacaggatggcggcatcaaggttgtaacgtcgaagcggctgtaacgtgacttcgcaggccagttcggcattcttgcacagcgacataaaatcgccggcttgcgaacgggtcgcgcggtattctggcaggtaacgccccgcctgacgcatcatccataccggggtgacatccacaggctggcgcaacagcgcacgcaaatagcgatcgtttttcagatcagtcatggtcttttccttgtaacgcctgcttgcaggcatgattgtcgctggcgatgaccgatcagcaatcggcctcgcggcacagtactaccgtgtcttcaatcagacgccgggctaccgtacccggcggcggcaattccggcaagcgatcataacggaaccagtcggcatcccgcagttcagacgggtcgggcttcacctcgcccccgtcgtagtcggccatgaacgccatcatcagcgaatgcgggaacggccagggctgggaactgacgtaacgcaggtttctgacgcggatattgctctcttccatcacttcccgtgccaccgcctgctccagggtttcccccacttccacaaaaccggccagcgtggtgtacatgttgcccttgtggcgcagattctttctcttcgtgctgtggatagttcacaacgctaatactgccttgtgcgtgcagttctgtacatagctgatgaaaggccggctcaataattgaacctgccagcgcggccgggctgtgcgccgtaatctgtatgtacagttgcggcggcgtatcgccgtcggcggggcgggttttggacaccagctctgcgatattcatttgatgcgaatcgaacaggtcggtaaagcgttcaatgatgtgtggtgagtcagcgacatcgaccttgacccacacggtggcgggcatcggcgagcgagactgcgattcggtgcgtttcatcacgatcagcaaatccagttcggcgcccttgagcggcagggtggattcaataagcgtaatcgcgttccaactgccggacagcagcatgatgaaggtgaactccgtgcccagcatcgcaagtcggctatcttcgatgttgcagccacaactgctgacgtggcgagtaatcgtattgacgataccgggacggtcggtccccaacgcggtaatgaccagatagtgttcttgtgggcgcggcaaaatagtgcttcctgtacaaaatgttgggagtaacatggtaaacataaaaaaaaccacctgccaagcgctgacaaccgcggttgcaagcttgcttttgcatagaagtcaaaagtaccatgaagcacttgtttgtggaggggatggccaatgtttacgggtagtattgttgctctggttacgccgatggacgacaaaggtgccgttgatcgcgcgagcctgaaagtgtggcggcattgaaatttgcggcgtcggtctttaccaacttaagccgcgatcaccttgattatcatggtgatatggaacactacgaagccgcgaaatggctgctttattctgagcatcattgcggtcaggcgattattaacgccgacgatgaagtgggccgccgctggctggcaaaactgccggacgcggttgcggtatcaatggaagatcatattaatccgaactgtcacggacgctggttgaaagcgaccgaagtgaactatcacgacagcggtgcgacgattcgctttagctcaagttggggcgatggcgaaattgaaagccatctgatgggcgcttttaacgtcagcaacctgctgctcgcgctggcgacactgttggcactcggctatccactggctgatctgctgaaaaccgccgcgcgtctgcaaccggtttgcggacgtatggaagtgttcactgcgccaggcaaaccgacggtggtggtggattacgcgcatacgccggatgcactggaaaaagccttacaggcggcgcgtctgcactgtgcgggcaagctgtggtgtgtctttggctgtggtggcgatcgcgataaaggtaagcgtccactgatgggcgcaattgccgaagagtttgctgacgtggcggtggtgacggacgataacccgcgtaccgaagaaccgcgtgccatcatcaacgatattctggcgggaatgttagatgccggacatgccaaagtgatggaaggccgtgctgaagcggtgacttgcgccgtcttccaacccgcccccggcccgcgctcggatagtacttcgagaatctgacgggcgaggaggtccctggccgacaccgctgggtcgactttgcgcgcgtacgtcccccctttcctttccgactttgttcgacttcctccagggacagggcgtcgtcgcactttgtcgcgcggtaatctggccatgctcgtcggggcggcgcgactcgctctgtttgagcgagcgagcgagcgagagcgagtcagaacgaagcgaggtgtcgctctttgccttttgagctgagtgcctgagccctcgagaggaccgagctcgctcgctctcgctcagccgaggcgtccaagctcgtatccgactgtacgagcgcatgcgtcaaccggcgggctacgagcttgcgtcccaacacccccccccttcccttcttcctgctgtcgacgcccgcacggtacgagcgtctctgataagcggctcggggccctgctcaggcagtgggcacggacgcacgggggggtcggacggaatgcgccttggcggcgagcggtgtgggtctggctggggtgtgggggctgagaggagctcatgggcgagcgatgacgaggggtgggaccgggttcgagcggcggatccttcggagggtcgtgtgtgcgcggtccgattggaaagggagagaagagggcgagtcgtcctttatggccgctcgaggtcggctcgtcacctcgaccccctccccccttcgttccatcatctttctcctgccagacgctcgccccagaggagcggcgaacgtcattcgaccctcgtcgctcgtctcggacgccgatgccgctggcgaggccgagaccgaggaccggctcgttgactcgcccctgacggcctcgcctcggccatcgctccggcggctcgacacgcccgtctacgtttcgccccgggacccggacgtctctgaggctgtcctgcgcgtcggagcttgggttggtatgacggcggcggcgacgcggcagcaggctgagggacggcggcaggcgaccatctgaatcggcctgcggagcggaggctggattgggggacggcggcgtggccgccggtgcgggcgtgggacgtatgtcagcgcccgctcatgcaacgagccctttctcttttcgacttgacgagatcatcatgccgtccttctctgtcctcttctttggctgctgtaagcgatgacggctgttcgcaatgctcggaggcctgatgactcgctatacgaggataccatctgacgacactcagtgacgagaaggcgtccgctcaagctcgactcgcgactggcgtctggttgaaaaagatctcgtcgcatcgatagcgatacaaagggtgacaggaaggatgcagagtgaaaagttgggcaggcacgcgtgcggcgagtctgcgaccggtcggggcagggagccgtctagacggtgatggtcgccttgacgggcaggtcgcgcgagctactgccgaccgagaacgtgtactcgcccgacgggatcgtccaagtctggcgctcgacgtcccagacggcgaggtccttggcccggacccgggcctcctcgaagctcttaaatggcctcgtccccctcccaacagcgaccctcgcaaccccgtcactcgtgcctgccctctccgaccgcgccctgacgcggctcctcgggcccaaaggcctcctcccgcaagtcaagcgcgggaccgtcgtcgacgacgtcgtcaaggcggtcggcgagctcaagggcgtgctcgactggcgcgtgtcgaagcagcagattctccaggccggttcgtccccaccccctctccctctcccgatcacacccctcatctttcgcacgacaccagcgcagatgggtctgacccttgccttcgttttgacccctcgtcctttccttaaccgccctacctcgccttcccgcgccctgcctcgccgttctcctcgcccgcctcgcccgcacgcctcgcccgtccgcccgccgggtcaccttagccgtcggtaggcccaacttcaccgcctcggagctcgagcagaacgtccttcagctcgtcggcgacctccgaaagtgcgggacggtcgccgcgacgtttgacgggcaggacgtcaactgtgcgtttttcgttcgtcgtctgctctctctctttctcttctctattcctttgccttcattcgcggtccttggctctcgtcggccgctgctgctggccgctctctttcatcacctttaaagcctgagctcgtgcgcctctggcattcccctcttcctccgtcctcctcctcttccctccttcccttcctccttcccttgtccacgccctgtccccgccgctgcgttcagggggctcgtcagggaggacgactgatcggtgctgctttctcatcctcgcaggcgctttctgctagtcttcgcgcctggatggccgaccgacccatcccaagagcgagagcgggcaggccaacctcggccagtcggttggtcggagcgaagcaaccctcccgcagccctccctcccctcgtcctccctctgtcgtacgcatgctccatcccactccgagactcaagcaagcccgcccgtcgcttgccgtccatccactctgagccgagagctgatacgcacatctggaagtttttgagggagagagttgtggagggaggaggagggggcgaggagtgggttgaacaggaggaggtcgacgacgttcgctcgcgcctgctgtcacctcgcccggccgaccggccgacggaccaagcaacactcactgccggccgaccaacgactctcttccgacacttgacccgctctcctccctcctctctcgcaaaaggaaaggcgttcgtccgtccatccatcatccccctcccgcgccctacatctcgtacttcactctgagcgccatctgaaacggcagcgcgacgtccgtcaccatcacctccccgccctcctcgaccagctccgcacagcgcctggcgaggttcggcgcggtggcggcctcgagcgctgggggtgacgagaagtagagcgggccgttggaggtggagagcgagggctttttgagctgtctgcgaagtgtgaagggggagggcggccgagggaggggtgaccccaccctggcccaactcccactcgccaaacaccctcgtatacctttccgcccccgccgcctgcaagctcctactcgacctcgcgcgatgcgcccggacagacgcgaggtcgatcgtcgcggtgacgacttcgacgtcggcgagcgaaaactgggagccttgggcgaggatgacgccgttcgagacgatcatcgcacagccgtcgtagtagagccggtcgccgtcgcagccttgctggttcgcatagaggtaaacgccgccgagctgggttgctcacaaacgcccgccgtccgtcggagtcagcgccgaccggtagcccccttatgcgcggcagggtagagggaagcgcaccttctgcgtcgcctctttgatgagctcgatccgcgtcgtcagcttgcggagctcgtggtggctcccgctcgaattcgtgaagatttcaacgccatcgaggcccatcaggacgtgtggcctgcgcgggtaggccaatcaactaagagtcagcgccaacgatgcgcaacgagcgcaggacagaggaggggtaggagacacgcacgcagcaggcgtaaagagctcctcgcagagctcgacgccgatgcacgtgtcgagcgtctggacgacgcagtcgccgaacggcaccttgagctggccggtcgcttggcggaggacggacggcaggaggtggtcctcgtgctgtctgtgtttgggccagggcgtgaagtagcggagctcgcgctgcgggcgggggcgcggggcagtcgggggttcagcagagttatgaccgaaaaacaaaaaggcgccgctggcgccttttttgccggtaaacgggattactggaacaggttttctctggcgtaggcttcgaagtcggtgcagccgccaatgtggttttcatccaggaaaatctgagggacggtttctaccggtttacctaccgttttggacaaatcggctttggtgatgccttccgcgtgaatatcgatataacggtaattgaaatcgtcacgctcttcggtcagtttgtcagccagctctttggcgcggacacaataaggacagccggggcgaccgaaaataactgcgtacatgtggactccttactttctaatattgtctgggttgccctgtaatcagggaaatacccacgttgtaaacggtttttagccaaccgcgttactatgcctgcaatcagggttgatctgaagcagtcattacctgtcataacgattagcgtcatctattgcaaccgtgttcgacgccagacatggcctaaaatcgctggcggcattggtctgtctgacggtctgacatatacttgccacttatgccgaatggtcgttttatcaacagaacggcgacgccggatgccgccgccggtactgtgcttgtctgctcgagcttcgcgccggaaagtgcagccggtgttgtgtcatctcaacattgtgtttcagggatattcaacgtgacgccaaccatttcactgctacgccaacaccgctccatccgatcgtttatcgaccagccgctcagcgacgagcagcgccggtcgaggaaggcagcgcgaacgtcaggagggccgatacaagtcccgaggacctcgaggccgttggcggcaaccgaggtaagcgacgactcctggcatttggcgacgttgagcgacaggccggcgtcgttgccgtcgaggaaggcaatgaccgactcgagcgctccggcctcggtcgagagcacgtagatgtcgtcgaggtaggcgagaacggcgtgcgagtcgccgaggtcggcctgaagggcctcgacggtgttgcggatgccgagcgagaacagaagcgggccgagagggtcgccttgacggacgccctggctagactcgagcgcggtgaccgagccgtcggcgccagagacgaacagcggcgtcggcgtatcgtacgcccagcggccggcgcgatagagggccggagcatgctgcgacagggccttggcgagcgaccgacggtcgagcgagttgaaggcgttggcaaagtcgagtgaggtgacgtgggtgaacggcttggggaggttgccatcgagggcccgctcgagcgcgcgcgtgatgggctctgtaccgccgctggagccgacgccgaactggaagggcagcaactgggacggagccgagtagtgacgaacgagggccttggtaaccagccggtacaggagctcgccaaccgcgatcggccggatgccgccgtcggccttgaggagcggcgtgagcctcgacgcgcaaaggagctgctggccaggagcgatgccctgggcgacctgccgtggcgggggggcgtcaccgactgagatctccaattgacgaaaaacgaccgggtctcttcccccccttcactttccccccttgcagatcctcgagctcctccgcttttcccagctcacaaagcgcatcccgatcgtcccggatttcatcagttacccaatcatccaggagggcccgcactggccgagtcgatggatggaatttgtacgtttccgctttttttcgccccgcctcttgcgattagctcttacgtcgtctgacgcgcgccccctccctccgtgtgtgctttcaaaggaaaccgtctttgacctcgagcgctacacgtccctcaccggccaagaaacgacgacgttccgcgctctaaagtcgccctcgtccgacattgtcgagcacctcccgtgcttcgcgacgtcgtaccgcgacggcctggccgagacgggcatctcggccggtcgttcgcgagggatcgactggtcgccttcggccacggtcgaggtcgacctctgggaggggccgctgacggcgcctttcggtgctgcgctccctttggagggcttggtcaagttttccgagggtaggagtaggggctgggaggggtgggttgacggtgtcgtggagcggttggagaaggagggcgagagagagatggcggagcgggcgaggccggagcaggagcttgtctgttgggccgaggtcggtcctcccttttcgctctaccctctcaatcaaccgcaccgcacgacaagactgacacttctcccggcctgcagcatgacgacgaccgctcgggctcagtcgatcgccttcagcagcggcagccctccttctcgtcctcgccgccgccccctttgcactcggcctccctcgcacacgacggccacccccgccggcggcggtcgtcggccgcggccctgtcgctccggtccttcgcgaccgtcacgcggtcgcccttgccgtcgccgccgctctcgcccctgatgacgtcggccggctatccgttgttcccttctccaccccctcctctcccactcgctccctctccctcttctccgtctccccggcagcagccctcgccctactccggctcaggctcgccacaagacccatacattgtctgctttgccccacgcgacccggccgacccccgaaactggccgacgccctaccgctggttcctgatgagctgcgccgcgctcgagatgacgggcgggacgctcggcatttccatctttacgagcgggttcggccagatgcggtaagtcgcttccgtctggccgtcaatcggacgcacggtgctgcgctggccgccaagccgaattaagggggaggggggcggacgggtgctgcgcgcaatgccaggaggaacagtctcctgaccggtgcttcctatgcctcccccccccttgtctcgcagggccgagtttggcgtcgagcgagaggtcatcgtcgtcggtacgacgctctatcttttcggtctaggtcggttccctctccctttcatcactgcgccgtcggatgaccctctcacccccccgcctcccgcccagccctcgaagccctcgcacgccagatggacgtcgacgtcgtcgtctgcggcgggacgggcaaatttgcgagctgggaggccggaggaaggctctttgttgatccggggagcgggacgggcgcgtggaatggcggggcgctcgggtacgtcgtctcgagagagagagaggtcgttggatcgcgctaggttcgaacagcagcctgacgcccctgctgccctgcccccatctcgctaccctcctcgtcaaatcgcacaaagcgagacacccgtcccgtcgtttgcgctgatggacatccagggcccccaagtcgtgacgtatgtctactcgctcgtcgccggcgaggtgcgttcctgccctccttccttcccccttttgagtttcctgctcctaccccctccgatcacagctcggcatctcatccttgcctcccgccgccgtgcctgccagctaactttcccccctcccaaactcttccccgctgcgctgtcccaggtcaaagttgaaaaaattgaataccgcaagccgatcgaagacaccccgtctgcctcaacaccatcctctacagcagcagcagcagcgggcgccgccggcgtcacggcgggcgtcggagggatggggatccgtgctggcgctggcgctggcagtgctggtggaggggatggaggctggtgagacgatggcgggccgatgggcgattagattggaacgacctaattcacgtctcttagttctgttgttgaggacgggtcgacggcgcgcgggaggtcgtcgacgctggtgccgccgcggccgccggtggtggtggtggtggtggtggtggtggtggtgcaggagctggcgagggagatgccggcagggggacggccgtcggttgaggcagcgacgctgccaccgcctcctttgccgttgcaaggcggtcgacgtcaacctcagccggcgcgcgtacgctgacgtcgacgtcagctagtgatgagccgccgggaaggcttgcgttgaccactgcttctgttgctcctcctgctgcctgaagggggaagacgacctcgaccgctgatgccgccgccgccgaggaaggtaagatcgggcgagtgtcgtcaaccgccctcacggtcggctgggcaaagaggttttcagacgggctcgcgccggtgttcggagcggacagagacgccaagaagggcggcggcgcctcctcgtctcgctccttgtcgtcgtcgtcgtcgtcgtcgtccgcgccaaagtcgatcaagtcgccgacagcagcgacctcagcctcctccgctgctggagggagacaagctgccgctggcgccagcgcgtccgcctcgtcctcgttctccaccgccgacgccgagagaggggtcgacggcgtcctcgtccccgacgggggcggggtcagagggagcgggacgtcggttggctgctgggcatctgacgtgcgctctacgacgacagcggcgtgagctggtgttggtgctgggggcttgagcgtcgatttttgtgatgctcgtcaggggggcggagcctatggaaaaacgcctgcggcgctggcttcttccggtgctttgctttttgctcacatgttctttccggctttatcccctgattctgtggataaccgtattaccgcttttgagtgagctgacaccgctcgccgcagtcgaacgtccgagcgtagcgagtcagtgagcgaggaagcggaagagcgccttatgtgacattttctccttacgctctgttgtgccgttcggcatcctgtcctgagcgttatctctctgtgctattttctacttcaaagcgtgtctggatgctgttctggagttcttctgcgagttcgtgcagcttctcacacatggtagcctgttcgtcagcatcgagtgcgtccagcttttcgagcagcgtcaggctttggctttttatgaatcctgccatgttgagtacggcttgctgctgcttgttcatcttttcgttttctccgttctgtctgtcatctgcgttgtgtgattatatcgcgtaccacttttcaactgttttaccgccggtattctgccgtctgacgctttgacgggtatttctgcctgacaatactgtcactgccaaaaaactgccgtgcctttgtcggtaattcgaacttgctgacaggacaggatgtgtaattgttataccgcgcatacatgcacgctattacaattaccctggtcagggcttcgccccgacaccccgtgtcagatacgcctgtagctgcacgagcaagagaaaagagggagggcgtcgttggccggtcagcatggacacaaagagcaaaggaggcaagcgagcagagacatactaggcaagctccttgcgggtctcctcgagctcctccttgagggctgtagtctctttgaccgactcgtcggcggcccccttcatcttcccctggacggcctcctcggcaacgacttgctcgacgacctcctcctcaacatgctcgacgaccttgaccttctcctcctcctccttctcctcctcctccttctcctcctcctccttctcctcgatgaactcctcttcctcagcgacctcgtcctcgacgacagcctcgatcatctcctcaatgtccttctcgacggccgcctcggcgacctcttccttgactgcgtccgatagcgcgacagccgtcgactcgaagcagagcgtcctgtaggcaagcagcagcagcagcagcatcagggcccaagacggtcagcaggtggccaagagcgagagggagtcgtgaaacggaagacgtactctgtagcgctctctggcgacgacgacatggccgactcgctctcccagccgtcactgcaaggcagtcgagcggtcagtcaagaccatcgccagacaggcaggtaggccaagaccaggggagagcgagagcgaacaggcaggacgtaccgcgacagaccggggaggcgacggaggcggcgtcaacgactcgacctcggcctcgtccgcctgacccgggtgcaggtcggcgaggggcccaagatacgctgtatttgcagccccccccccccccgcgctctctggacgagtacgagagccgcaagccatccgcatgccatcttctggtcctcaaatcgacctcagtcatcgaagccatcgtcgtcggccccatcgccctcgtacgagccggacgagccagaccgtcggcggggtaggacgtgatgtctgttccgtccgcgcggagggcatggggcgaggcaatgcaacgggaagacatcagcaacgggtcccgacagagcggggaaaggagatttgtcgctccgactgacctcctcaagagcccttcgatcccgccctcctctccctctagctccaaatcaagcctgataaagctcttccgcagctctccccccggcgcataaaccagcaagctcggtagcaagtcgaggtccggcctgcccgtcaacggtgtgaggaagaggtcgagtgtcgacgctcgggcgaggaggaacgaatgagagggaggggggtgggaggctgcgagcgattggagggcaaggaggacggcggaggagaggttcttgatctcctgctcgggggaagggagggggacgtcagctgccgaaccaacgaatgatcaggtaagccgcaagggatgtaccggctcaaagacgagtacgacgacccagccctgtgcgcggtcgaccgcattcaggaaaccgtcgctgctgacctcccgtaggaagccccctgtctcttataataaaaacgggctggccacatgagggttcttctccactggcagacagggcaatgacggacacggcaaaattgcgcactacgaagccgtaggcgcgtttctccggtttccatgatggtagaccaaccaaaacgtaacaaaccgctacaggaggccatacggagtgcatagcgctcgaattcagcagcagtctggtagatacccccgacagaatcggtaagcgtgcgctgggtatcccaaactgcatcacgggggctgtagtccgaaaggaatttatcttctgtcattaagcctgctccgatctgggcaggctgtgatttgatgtggtatattcatcacgtacctgtgcattgcgagccagtacatgtcaccagagtttgccgctgaggtgacacattcgaaatgttggggagtgttgacgcactccccaacgccgattaaaaacgcctcaattctgctccattttctttgacctgtcaaaacccactcaaagcctcgtcattactgggctaaaccactatttcatacccgccatttatcccttaagtataaatacaaggatcacgcgcgagaattgcgcaaaaaataaccacaattttaaccccccaaaacaagcaccccgaacggcttaccccaaccttttccacacacccgatcaccaaaacaggggataaaaacaaaaccctgtcttacaggtggatggcctcacttcgtgaaaccatccaccccgcataagttttttaatcggtgtcttagtgatccggtggttctgtatggaagggccatcgctcaacggataaaaggtactccggggataacaggctgataccgcccaagagttcatatcgacggcggtgtttggcacctcgatgtcggctcatcacatcctggggctgaagtaggtcccaagggtatggctgttcgccatttaaagtggtacgcgagctgggtttagaacgtcgtgagacagttcggtccctatctgccgtgggcgctggagaactgaggggggctgctcctagtacgagaggaccggagtggacgcatcactggtgttcgggttgtcatgccaatggcactgcccggtagctaaatgcggaagagataagtgctgaaagcatctaagcacgaaacttgccccgagatgagttctccctgactccttgagagtcctgaaggaacgttgaagacgacgacgttgataggccgggtgtgtaagcgcagcgatgcgttgagctaaccggtactaatgaaccgtgaggcttaaccttacaacgccgaagctgttttggcggattgagagaagattttcagcctgatacagattaaatcagaacgcagaagcggtctgataaaacagaatttgtctggcggcagtagcgcggtggtcccacctgaccccatgccgaactcagaagtgaaacgccgtagcgccgatggtagtgtggggtctcaccatgcgagagaagggaactgccagacatcaaataaaaccggttggttcctcgatgtaggccttagcgagcgagccagcaacgagggcgaatggcttggaccacgcgagagggagcggcttgtggacggtccggcaggctgcgagggtggcgaaccggtcgacgagaggtacagcaggctcgacatgaggggtgtgtgaggccgaggggacgacaggtcgagcaccgccgaccgaggcacgacgacgagcagcggcgggccgaacgacgagcagcgagccgtccgagctgaccgagctcgtgggtgaggcgacaaatggaccgggcgagccgagcgacgataccgagagggcacgaggacgggccggacgacgagctggtgtggcgacgaccggtggcgagacaggccgaccgtttgaggagctggtcgacgacgacgacgacgacgacaagagggaggcccgacgtcgagccggctgcgagaccgtaggcgcaagacgagaagcgacggccgaggatgcgagccgagaagaggcggctggggcggaaaacgacgtcggcggggtggtttgccgacaggcccagccagcacacttggtcttgccttggtgcgtcttgatgccggcggtactgatggcgagagcaccgcagacgcacccgaagaggccggtcacgaggagctgcgagcggctgagccgacgaccggggtgctgccgcttgaggtgctcgagcaggttgacgtacgggttgctgcagagggggcaagcaaccggtgccatggcggtcgccctcccacctcccaatactcgtcggctcgtcgctcgaagcgccgctcgtcgacctgctcctctcggcgctcgacgccgcccctgcggccgccgctgcggaggggggcgtgacgttaggggacaaggagagggcagagatggtgaagtcgttcgagggcgcgaaacgctgggcgctcgtgctcatgatgacgccgcgagggcgcgagcgctgggcggccttcagggcgggcctctagcgggatcatcgctcgtctggctgggaggaaagagggaaggggggaaggggcgagaaatgcgcattgccattgcctcattcgtcttcgtcgtccatcggccggacccagccggcggctttgcctctctgtcgcgcagccaaaggaagaggggatcagcgacgaacgacggggagaggcagcgcgcacgagaggaacccaccgtcgaccgatcgtacagctcgagcgtcacgctcgccagaaagcaaggcacctcctgcctttgcgtcacccaaaactccctcagctcgtccaacgtcccgctcaaccccccactgaccgccatgctcccgaagtgcccctcctggctcgcgaaacggaaggtgacgccagacttgccgcgcggcgcataggtcgtgttgagccggacgtcgccagagtcagagaagaggatgcggtatccgaggagcgagtggagcgtgtccaaaaactcttgcgactttgctttgaagacctgcggggggagggccccttcgccccgccggcgctcgccccccagctcctcaactgccgctcgccatacgcgacgcccgatccggcctgctccgggtcgagcgcaccagactcgatcgagaggacgatggcgcgcgcgacgagcatgaacggcaggtggggctggtgcggggtcaacgaggacgtctcaaggtggaggacgccctgtgcgtcccatccagcaaaaccaggaggaggaggaagggagaggttagcaaaggcgagggcggcgttaagagagggagagcggatggagggacgtacgttctcttctgcccacctactcgcctccaagctcggcacttccctctcctcctccctatcgaccttacaccccacgacgaccacctcgaccccctttgccccgagcgcgcggacgtcggcgagccagcggcccagcgcggcgaacgacgggcgcgaggtgacgtcgtagatgaggaggcaaccggccgcaccgcggtagtaggagcgcgtgacggaccggaagcgctcttggccggctgtgtcccagagctttaaaagcgggcggagagaggagcgttatgagttgcgctctcgtgtgtgactcagcccgctcgtctgatcggctggatggctttccctcttgcccttctcgagcccctcgccctcgcaatctcctccagtcactatctgaccccattccctcctctcgagtctcccctccttcagcagccgacagccctcgctgcccccccgagcagggccaaaggggatcacagcaagccagcgtcttgccaccggggaggagttgtcaaggatggtggtggcagaggacgcaggcaacgcacagagtagagcctcgcgacgggtggcgaaggcggcttggcagcgagcgcgctgggagacgatgacgggggccgcgtccgggtcggggtcgtcggccggggagagggcagcgtcgacgagcaggtcggcagactcggccatggcggcccgggcgtgcggcgagcactcggcgtgcgacagtaggcccatgcctccgaggcgggcaggcagcgtcgcgaggccagcgtccgatgccagacgacgaggtgagccgcggatgaggagcagccgctcgagcagcgcgttgtcgagcgtgagccagggtgagtcaaggtcgtccgttcgaagcgagcgctgaaggtgccggaggttggcctgcaagcattggcggagcagtaagagggcctcctgaggcggcaggtcggcgagccggtcgatggccggcagctggtcggcgatgcgccggtcgaggaaggcagcgcgaacgtcaggagggccgatacaagtcccgaggacctcgaggccgttggcggcaaccgaggtaagcgacgactcctggcatttggcgacgttgagcgacaggccggcgtcgttgccgtcgaggaaggcaatgaccgactcgagcgctccggcctcggtcgagagcacgtagatgtcgtcgaggtaggcggaaggtcagctcgagtcggcaagggctcgaggggctgctagcggaagaggcgggcgtcgggtgggagacggacaggcgggatagaggttgaactgcggaaggtcgagcggtcgatcgtcgggactgattggctggaggagcgagcagcagaaatttgtcaggatttttgaacggaatacaagcaggagcacgagagagagaaagagaagggacggacctcatgaggtgctcgagccgctcaatccagtcgtccgcctcccacccgacgcccgcctcttccgctagcagcccctcgagcccttgccgactcgagctgaccttcggccatggctcgccgaggagcgagttgctgagcccggcgatacgcgaggagacgtcctcgacgggcgagggaatggctggctggcaagatgcggacgggcctgggtcgaaggcggatggggtcggcgagcggtttgagaggtagccaatttcgacgggcgcggagggcaaccgagcgtttggaaagctgactgaccggcctgcagtgtcggtcgtgggtggagaggaggtcgcttcgccggcgctcgacagatcctcccccgccggcagagggaagaccgagaacagcagcagattgaaccccgcatacgcatgcgccccggccgcgagcgactcgcttaaaaaggcaagcggcgagcagcccagcgtgggatcggctgggcttgagggggacggcagcggcggcggtggtggagggctcactccctccgccctgcccgcccactcgcctgcccgtccgcagtcgacgaccgaagacgacatcacgaacctcgtttccgagctcaaggacaaggagacggtcgtctttcactgtacgatgagccaggtaggtctcctctactttctctctctctgtctctctctctctctgccacccgcccgcgtcaactttctttactcgctcccgctctctcccgacttccttccgcccctcgcgcctccgcttgcgccaccccgtcgtgcgagcatgtcctcgggccgtcgtcgtgcctttgtgcgggtcgcacgcgttcgaaatctgtcgcgctccagagggaggggcaaagggcggcacagcgccggtccttctcgtctagcttgtgcttcgtctcgatcttgcatcactcgctgtcgtcacaagggcttgccttcagcttctgggacgcttgattgacgacgtgcctcccctccttccccttccccattcatccctgtcctcttttctcgtctttctcaactttccccttccccggccgctcgcccctgctgctcacctcgcgctccccgtccctctcctctaattccaggtgcgcggacccaaagccgccagccgctacagcgcagcgctcgccgagctcgcgcccgaacgccagcagcaagtcttgatcctccacgaggggttcgcaggctggcagggcaagttccgggtcagtttccttatgagcgctttaagggggacaggagggagagagagagggagaggaggagcgttgggaggaggaggatcaggggggagacttgatgaagggtcgacgacagcctgctagagaacggagaggaaagacgcgaggaggccggaaaggccggcacggtccttggaggcgggcgtggaagcgggttgacggacgaaggccgcgagaggaccgcaagcgaaaggtcgagggcgagcatgcagctgcctagaaggatcaactgcgcatcgccgccgtcgtcgtcgtcgttggcgcgcggagaaggcgatgaccggttgggggtgaagaagggcgagagagcccggcgagagcggagaaaagggataaagcaagaagcagggaaggggggggggggttaggttagcgagtgaagcggctgcggattcgtccccgctggcctgcgcgcggtcgttcgggctcgctcggatgcctagggcggcaactcgaggagagacgcaggcgaggtactgcggtcgggcggagaagcggaaaatggacgaacctgttccctgacgtcgacccctcgtcctcctcttccctcgcccgctcgccgcacgcccgggaaggagacgattgcaggccagccgaacgtgtcgagtgcgcattgagaaagtgccagcgcggaaaggagggcggcgagcgagcgtgcgaacaaggggtgtgtggacgggaggaggggggcgaggcgctgtacgtgcggagtgagaggggtgaggggactttgggcggggggggcgacgtacgtccgactcgccgttccgccggctctcgatgatgccgaggtaaaagtccgacatctccttctgcgccttgtcgcgcttccagtagctcggcaggggcagatacggaaacaaaaagttgataggcgtaaacccgcggtcgaggtcctcgtacttctgggcaaacgtcttgtcgagcgccgatcggacctctttgccctggagcgtccgactcgccgtcaggatcgtcagctcggcgagtgtcttgaggcccgggaatgcatgccacttgctgcttgtcggcttctcggccgcgttgttgaagacgggcgcgaaatgggcgtccgaggcgagcatgccgttgaactcgtcgacaatcatcggaatgtaggctttgaggttatcgagcgagagaccaaacttgacaaacttcttctgctccatcagcactgcgcgcacgcacgcgcgggcgaagggccggggggggagggagcgacgagagagcgtcagtctttctcatacctctcacgtaagcagcacgccgcaaggagaagtcgagaggaggaacgacgaactcgagtttgggcagtcgtaaacgacgcctttgccaaagacgggcgtcgtcagatgcgtataggcgtcttcggccgagacttgcgagagcttgccgccgaggatgaggtcgttgccctgcgtttgggcgcgcgcgcagtagggagaggggaggggtcgcatacgctaacccccctcccgggtcacagtggcacgagctcgacacagccctatcgctcgtctacggcgaccgcgacgacggacgcccggcgtcgctcgtcgggtcggtcgtggtcctccttggcagtggagcgctcgttgcgtggtgtgttgggagaggcggagggagggagagaagaggcagcgtgtgccagggagggcaagacacggggttgacgacggggacgatggatgagtggcatgagctggcttgacagcctgggccggcctgggcctcgcatcgtcttcggtggccgaccctgctttgcccatcgccgcaaagaaggccagacgaggtagcgccgatgcgaataagaaactaggggggggggtccgttacaatgcatgcaagtggcgcgagaagccgagcgccgagggctcctcgtcatcttcttccgtgaagggctcgaagatcggagtgaaatggagtggagtaggacggccaagaacggccgaggagggcatgagggtactggagcgaaatgagaggaatgtatgaggggagggtgggtgagcgggcagcgaccgaccgaccgaccgaccgttcgagctaggccgaagcagggcggggggccgatgacgacgacgacggcagcggcggtggttccggcccggctcggtcggttggttgtgaggctggatagtcgtcgacgggcccgctgaggatgtcgtcgaacaggccgaaacatcgaaaagatcggcgggaaatacgctacgcaaacgttttctttttctgttagaatgcgccgcgaacaggctgaccggcgctgcaattgtcatcgttcattattaggataggtcatggtttgggttgattacgtcattatcggtattatcggattctcggctctggtcagtctcatccgggggtttgtacgtgaagcgctgtcactggtgacctggggggcggcgttctttatcgccagccactactatgcctatctcgcggtctatttcacgcggtttaatgatgagctggtgcgcaacggtatcgccattgccattctgtttattgcgacgttgattgtgggcgctatcgtcaattatgtgatcggttcgctggttgaacgcaccggactgtcaggcactgatcgggtactgggcgtttgcttcggtgcattgcgcggtgtgctgattgtctccgcactgctgttctttctggataccttcaccggtttttcacagagtgctgactggaagcagtcccatttaatcccgcagttcagttatatcatcaggtggttttttgactacctgcaaagcacgtcgagtttcttgccgcggcacatctagccgcggtagcgctgatgaggaaaagaccacatgtgcggtattgtcggtatcgccggttttacaccggtcaaccagtcgatttatgacgcgttaacggtgttacagcaccgtgggcaggatgcctctcccttctcatcgcccttgctcgccttcctggccgtcttggccctcgatctctcttcgccgcctctgctccttcgcccgtcgtcgttcggccaattcgcccacccccgctgtctctggcctttatcggacccccatcccccctcctcgccttgtccttctccccaacaaaaacacactccctttgcctctaatctgctttacttgctccctttcgccgcttgacccgcaggcaacaccccacacaacccctgccgcttcgcagacacgatcggcctcgtcgtcgaacgtgtccggcctgcagggtcgatcggtgcgtcctaccctgacctctgctcgctcctcgtcgcattgggctttgagctcgttgcttggccgttacggggcactgtcgagtgtgctctcgcggtcattctccccgtccgctcgcgcggcgcgagtgagctcgtacaacaccccacatccccctcccctccgcttcgccttcacggggaaagcaccccctcctcgcgcacgaagcaccaagcgtccgactctaccgcctctaccgcctgctcgctcgccagacgcgcgccgtcggctggcggccttggccccccttcgctccgtcaggcgctgcagactcgtctgcttgcgtctcgcccgagtagaagggaggggcagtcgttcgtcgccctgcttttaaaagaagtgcagggcgtctgtgccctcgtactctagggcgtccctccgctgaccacccttcctccctcggcgcgcgcgcagtccaagacctgcccgacccctcctcgtcaacgacagcagcagtgcaggcagcagcgccgttcgtccatgccctccttcaaagaccccagccgacggccgaggtgtttgatttcgacctcaactcggacttggacgactgagcacgcatgtcgtcggctcgttctcggtggacatgcatgagcccgtctctgagggtgactgcgcgagcggctggggagggagcgacgggcgagcgagcgtaggattggggcaaacgggcggaggagggtaagggaagcgagaccatggagcatcgcaacaagcgtaaacaagcagccttcaggcctggacgacgaacggcggctcgccagcctcagtccgctcgtctgctgctgctgtactagcagcagccgccttcttcgccgcctcctccgagccctcgccgacccactcgtccatccatcgaaacacctcgtgatgccacctgatcgaattccccccgtcgagcacccaatggttctctttcgggaagaagagcaggcgcgagggtacgttttggacctggagtgcggtgaaggctccgagggcgttttgttcgccgagccggaaatcgcggccgccatggatgacgagttcaggtgtgcgccaatgcgagacgtgattggccgggttccacctttgcgcgcaagaggagaaaggggggatgggagggcggcggccaaggcggaggatgcgggcgaaccgcgggaggcggccaagccggacgcagcaagaggcgagacggcccttgcggccgacgagatcgacagcttgatcttgggcatcgccggcggcggcgcagccgagggcgctgggctcgcggtcgtcgtcgttggctgcggcgtgccggccttgctccctccagcagcgcctgccgccgccgtcgtcatcggctgcacgactccagcagcaggcggcgtctgagcccgcgagcctgcagcagcagcagcagccggcgtctgagcccgcgagcctgcagcagcagcagcagccggcgtctgagcccgcgagcctgcagcagcagcagcagcagcgacgaccgacggctcacggctcctgtctttcttcttgaaacgcggcaggtcgtcccctgctcctccagccaccttgccaggcttgagcgcctggacagaggccggcattggcccgggcgtcatgcgctcgcgcttccgttcgggcccattgctggcctcgaccgccgctgcggccggcgtcgtcgtcgcgccccgctcctcggccccccgaaggccgttgtcgttgtcgttcccgcgtccgtcgtcgtcatcgtcgctgacaatcgtccccgtccgtttgcgcttcttcttgacctgtctcgcgagcgcaatcgacgacgacgcgtccgagagcatgccctcgtcccataccgaataaattttcaggacttacagcccctcaatgccaaaacacaatagtttttaacaacaagattggggggcgtaagccctgattttataaaatcccattatggcgcagcaaggcatcaatcgtcgcgggtcttcctctgaattcaacaaaagcatcggctgcttttcttgagccgcctacctccagaatggattttaaaaagtcatgtccagttttggggttgaaaataccttcctcctcaaagcgcgcaaaggcatcgctggataatacttctgcccacatgtaactgtaataaccagcggcgtagccacccccaaaaatatgcgagaagctgtgctgaaagcgattataaggaacaatgggtacaacactggttttagaacgtacatccgccagaatatttgggacaaatgacgctttacccgtttgatattcctggtgaatgcgaaaatcaaacaaggcgaattccatttgtcttaacatggccatggcggattgaaaatttttagcagcaatcaagcgctcgtacaatgcggaaggcaaggtttcccctgtatccacgtgcgaagtcagtaaagacaatgcgtgctcatcccagcaccagttttcgaaaaattggctgggtaattccaccgcatcccattccacgccattaatccctgagccgccaaggtaatcgacttgagtcaaaacgtgatgcagacgaacagtcggagaccctcatgacgggaaggggagggaagaggggagggcggcgcaccgtcatactcgtgccagtagctcgtgtgccgaagcgcattgtgcgggtcatactcgaacgacacggcgctcagcgggctccatttcgcatgcgtctttgcaatccccttctgggccttgcagacgaggtcgagctcctggcctttcgccagcttgacgaggtagattggcttgatcgccgtcgttgctcccgaagcgtcgccgtcgaggccggtggaggacgaggagggaggggcggactttcctacgggctcgccaaagtggagcgcgcgggcggcacgctcttcgggcgaagcgacgtcggcattcgagggcgggccgtaagggttggcggccacgttgccggctggcgaaacgaagcgaagtcgaggtcagcctcctgactgggcagagagagagctcggccgatcgtcggggtccctcgccagggtgtcaaaacgccggagcggcccccgggcgagcgacagatgacgggcgcgtagagagcaacagcgcaagagagaggagaaaggaactcaccgccgtcaaacagctcgagcatgttggacgtgacaacgagaggctcgttgctcgcgcgggcacggagccggagggtgattgtgcagtgggcgcagccttcggcacagtcgcattcctggcgagaaggggaggggggctctcgggagtcctaaggccagaggacgtccaatgaaagccattgccccccctccctcttgcgctttgctcgctggcaaaatcttcatgcccaaggccgctcctcgcccggacccgacgcatgagcggaagccttctggtcgagcgacagccctcgggtcgtcgtcggacgaccgaccgcctccggtacgagcatcgtgagctgagccagccacgccgatgaccttcggtgaagacccgcacgaagtctatgcgtacacggccaggagaagagaaggaacgcacaagctcgtacgggtccaggcttgcggacggctgacggtagggcgggatgctggcgagccgaggggacgatcgtgcggcgcaaggaaggcgaggagaggacggaattaggtcaggctcgaggtcaagcacaaaggccagcgttcctgcctagcacagtgcacgtattctttcgcgaactgaccctgcgcgcctcgcaacctcgttcgggatcgtctcagagacgtctgggttaaggaaaggccgccttggccggttgtcgccctttgccgacgggtaggcccactcgtcgggctggcggagcgcgcgcgggtgggagagggcgagcgtccggcgctggagagccggccgggaggaggagccggcgccggcaagcgaggggaggagcgtgcgcgagctggccatggcggagggcagggagggttgctccagggcatcaccatcctctacacggtcgccttctttgcccttgtcttcatcctcatgtggcgccgctcgcggcccaagagcacggcggccaagaagtaaatcgcttcttctctccctttctttttctcctctagatctctccctctctttcgcgcgcgcgcgaaaattttgtcttccttcgttctacccctctctctctcgacggacgttcggctcccttctcagagctatgcccttcccttcatctccctgtctcgcctggccgccccttttcttacaacccttcaatcactcgagtgcgcttcgcctttgcgaagctgcatgtaatgccttcctgccaaccaggagacggaggactcgtgcgagcgaccgcctttccgtaagctttcggcttctctagagcctgggttgggttgggcacccggtctcaacttagaacgagtggcgaagccaatcgaaagcgggctgccgaaagcacgtcggccgtcggacggtcgtcgcgccctgctgcgtctctcatagtcgatcatgctcaccgcaccgcccgtctgtccgacagcgagcgagcaaactcgaaccacggcgggcgggctggcgagctgattgcctaaggaggtgtaccccatcggaacgcatcgagcctcaatgcatctgaccgggttcaagatgggcatggccccgcaagcgactctcggacgcgtgccgcggcagcacgataacggcgcaggacgcccttgctgtcgccagcgggggtaacctgaccaacagtgagggcgggctgctgaacgcgggcggcgcgctgaatctggtggcgctgggcaacctgaccaacagcagcgcgacgatacagggcaatacggtgacgctggcgagcgtcggcggggatatcgtcaacaccacgacgacagaccagtggcaatttgaatccagaaatggacgtgaacgattaaaccatactgacattggtcaaacgggattgattaatgcgcagagcgcgctgacgctgcaggcggggcacgatatcgcgctgaacggggcgcagctgagcgcgggcgggccgctgcagctggcggcgggcaacgacatccggctgacggcgctgaccacgctggcggacacggtacgtcaggatggcggggccaccaccgagcggcgcggtcaagggctggtgcagagcacggtggccagcgggggcgacctgagcctgagcgccgggcgtgacctgagcagcacggcggcgcagctgagcgcggcggggacgctggggctgtcggcggggcgtgacctgagcctgctgtcggccggtgaggagcagttcagttcgaacgcgtggaaacggcatctggactggcagcagacggtgacgcagcaggggacggtgctgaatgccggggaggggctgagccctaccccccctctcccgttcctctcgcacccgtccgccctctcgcgcacgcaacgcaggtcgacgacattcaggccctcctcggcccgggctggcagtgggtcggcgccggccgggacgacggcaagcaagcgggcgagtacgccccaatcttctacgtccgtccttttacgtctctcgtcttccagtgctggttctcgtcgtgggtggctggacgggacgttctgcaaggaggcattcggcgtgcgaatttgccaggcattcaggccggatgcccctctgagctctacctcagccatctgcccgcctgccgttccaccgtcgccctccttctctctcacctctgaaccgaccgaccgaaccggcgactctctcaaccaagctgaccacctttccccatcgaccaaccatcctgtcaactcccctttccgcacccaccccgcagaacgcagaccgcttccaacggatcgcgcacgacgtcgtctggctctcgccgacgccggatatcgctggttcgaaaggatgggacgcggtccgtcctcctcctcctccttacccgtcctctcattccttcgctcggaatgcgggcgggggctcgtatattgcggatttgaccgagacggagagagctgacgcccccctccccctccttccccatctcagtcccaaccccgcatagcaaccttcctcactctcctcgacctctccagcatcttccaaatcttcttctacgccctccgcccctccttcgtccgctccgccgggtccttcacccgctggcacgccctcaacttcgccgtcgtcctcggcgccgacgcgctgctgacaaagacgtttggctggacgcccgtcctctacctgctcttctcgagcttcttcgcggggagtctccacccgcttgccgggcattttatcggtgcgccccgctctcccctttgctcgcggccttgctttcgctagagtccccgacaccgctcgctgacgacgtgctccgccccgcgcccaaacagccgagcactacgccttcaaagagggcgatgaccaagagacctactcgtactacggcccgctcaacgtcctcgcctacaatgtcggcttccacaacgagcaccacgatttcccaaatgtcccctggacgcggctcccgcagatcaagcagatcgcgccagagtggtacgatgagagcaagctgaagagccatgcgagctggccgggggtcacctggcggttcatcacggacaagaacgtcgggatgttttcgcgcatcaagcgcgagaacgtccggggcgactgaaggccccccgccccttgcctctctctatctcgctcgctctctcgctcttgaaattcctccattcagttgctttcctttgcacgaccctccaacccccccccgacactcgttcgacaacgctgcgcccagtcggcaacgtctgcgatcgcatctgacgacgctctgactctccggcgggcagcgccagggccgacgtgcgtcgttggccatcgccgagtgaaagcgacgacgcgagcgtctcctgccccaggcctgcctgtgcggtcccgaacaccccccccccggcgagccggcaagcagcccacctcggaccatcgccttgctcgactcgggcgtaggctgtggcttctctgatgagcggccaacaggagacgcctgagtcaaggccgggcgcccgtgctgcaagcaacgtcgacgccgcaccgcctctgctgcacggagcgagcggctaagagagcaagatggcggacgtaccgaacgacttggcgaccgtctcggcctcctcggccgtgaaagcgggcttgaagtcgggcgtggcgattccgtactagcagggaagttgtgcaagaggcgacagaggtcagcctttcggtgccggcaagagagatgcagaggacggggcggaggggccaaaagagcggcggacgcacgtcgcgcattagctgctggctctggtactcgtgaagcgacatggcgcgcttcgagaccgtggacgcccgggcgacggggcgcgagcggaggagggagcgggcggcgaacatgtttgagagagagtaaaggagaaggggggaggggttgatggaggaggaaggccaacgcctttaacaccgtcgaccgtcgcgacctcgccgcaggactccgcgactttgcccctgccttctaccgcgccggtcgctggatctacggctcgtcgtccaagctcgcggtcaccggtgccgacggtgcggttgaggcgctcgagtcatcccagggggtgcggcagggcgatccgttgggcccgcttttcttctcggtcgccattcgtcggacgctcgacgacctcgtccgccacctcggccccgaccgactgctgctcggttaccttgacgacctgtacgttctctcgccggatgacggtgcctttgacgacgtccagacgttcttcgacggccgcggctcgtgcctcgagctcaacatcaccaagtccaagtcccacgccctcgaggacatccggtcggacggtctcgacatccttggcacggcggtcggcagctcggcgtttcggtcggcgttccttcgtgacaagatcaagcaccaggtcggcctccttcaccagctcggcgacctcaaagcccagcatgccctgctcttgcttcggttctgcatccagcaggaccttcggcacctgcagcggacgctcaagacggacgaccttcctggctgctgggacgatctcgacggcgctctcctcgactcggctcttctcatccggtcttcgcctcgacgcctcgcaacggacgccgacctcgttacccctcccccccccgtccttgcctctcgcctgcttgccgacacctgccgcttccgtccgacgatacccagctgacccacacccaatgccgtccttttcgtgtttcgcgccaacagacgctcaaaggcaggcaagctcgaggccgagctgcacgcgctcgagcgaaagctcgcagaggccgacgcgcgcgaacggtcgctgcgcggcggcggcggcggcggcggcggggggcggtaagcgcccctgcaggccgtccgaccgagccttctcagacgggtacgtgagagcgatgcggacgatttctcgtttcatctgtgagatcaggggggggagagctaaagctttggggcgctcgtgtgctgaccttcgttcgttcgcaggggcgagccttcgtgccgaagccgaccacaactgaattcgcttcgggtccaagtccctctccgtccggcacgttcaggcgcaagccgtgcaaacgagggacgatctggctcgtgattccctccccgaacgtgagctggtcagtcttgggaggcccgaatggcaggcgaggctaaagcactgaaccgatcttcctaaaccaccgcctgtaaccagcctctccgtccgacgcccatcccctctcgcttctgtccccttctttttctcctgatccctccgtcacagctcctacaccgacctctcagcccatcgtctttaaccgagcggcagaagcgcgtcacgacggtcaccggccagctcggcgccatggccgtccaccggcagaccacgaacgaccctggccgcggctcggcaggcaggcgcgagaagcgccccgaccccccggccggcttcacctgggagcagtgttggaagtgcgccggcaagcgccacttcggacgctgcgacgagcgtacgcgcgcgacgcccgcccccccggcccgtcaggacggcggccacggcacggctcagctcgcgaccggcgcggtgacattcgacgagggcgtggattatgacatgggtctgcacgtttatcaagcaggcacatcttcagacgtcagcgctttcatcctcgactcgggcgcatcggagcatctcgtgcagcagaagagcatgctctggaactacacgcccttcaagaccccccagcccctcgtgacggcaaataaaggttcttcgatctacgcacatggacacggaacgctagtgctcgacgtgaccgtcgacggcaagacgagccgacggcagctgccacaagctctgttcacgccagatgtcacaacgaacctcgtgtcagtctcggtcttgactcgacgacaaggggcacgctgcgttctgacgagcgacggcgcgatgatcgagaaggacggacgcaccatcatgacggcctcgcaccgcggcccctcgattctgctcgacgccttcctcctcctcgtctacacactcctcattgccctcttcacattctacgccgcgccgcccgcatccgacccactgcgcgcaggcgtcatcgcccttggccaagtgccgctcgccgtgctgttgggctgcaagagctcgccgttggcgcttgcgctcttggggaaaggggcggagcgggtgaattttttgcacagggcggtcgggaaattgatctttggcgggtcgacgctgcatgcggccgtttactgtgggtcccccaatcttcgcttctgcctcccttcctttacccccaacatgccctccttgtcgccctctattctctctctcacatccactggctgacgccccccgcccaccgcgcttgctccttctccccttccctgcccctcctctccgcctctctcgcagtccacaaatgggccaaagccgacatctcgtttgcgaccaagacccagacgcccgtcttcgtctcggccttcatcgcctacatggccctctgcgtcgttgcgatcgcgagcgtgccggtcgtgcgtcgcctccttttcccttactcgccggtgcgcgaggttgagaggatggtgctgactctcgcctcgccccctttccgacggctcgcctggcgctcgcgcgactagatccggcgccgggcttttgagctctttgttgtctgtcattgggtcgggttcatggtcggcgagtgggagggagaggccgaggagcaggttgaggaagaggaagggcgacatggtggccgttagggggggagcagcatgtccgcccttgaccatcaccccgaagtagacgacagcatcgtcttgtagtcgacagacggcatcctcagcccttgctcgagctgtctgtcgccgtacacagtctcgcctggctcggcgtcctgtcgctctctgtcgctctacctgctcgccagcagcttgcacgaggccgaccaccagctcgccctcgtacgaccttgcagcgagcaacatgcccggcgccccaagccagctagcgacagtcgcatcagactcgacgactgccgcctcatcgtcgtcgacagcagtcgcacccgcctccagcgtgcccaagaagcgctcccggaccggtccgcgtcctgtcgccgccctctctcctccctcgctctctctgacctccacctgctcatccctcgcacaggctgtctcgtctgccgcaaacgcaagcacgcctgcgaccaagagcgccatccaactcccagtgggacatacgcctgtgcgcggtgcgtcaagggtgggaaggagtgtctgtggccggtcgaggtcgcgctggagaagcggttcgcgagggtgcctgctgccgcagcaggggcggcggtggcgggcgggggagggagtgaggggagcggtcggacagccgctcggccgtcgctcgctctcgtcaccgtcgctggctagccttcgaccgggcctgacggtcgcatcctgctcgtgcgcgcttctggtccaccgactccgtccctgtctgcgattccatgcccttcacttcgacaacttgtctggcgactctgcaagcggctgcaggcctctgccaggcgccggctacaggaccagcagcatcagatgaggcgactgaccaaaactgcttgctcgagggcgcgctcgaggcgcgaaggagtaggccgacgacgcattggctccgggcgagcaggcatgacaacgccggcttccagctgccccctgcgaggccttctgatctactggatagtcctagtgtaggtcagtatacaggcctttcgtcagtcgctgccgacttctgtgtctcaggcttggtcggtaggtctggcgtggtctggcgagattcatggtcggagagagcaggtcgagctcgcgtcttcggccgcgtcgtcgcctggctatcgacggccatgccaccagtcgctcctcttccgtcgagctcgagctcatcctactgtcgatctgagctgacagcgagccgagtagcaaggcaagccgccgactgcacctccgtcggtgcaagagcttgccggcgtcgtcagagcctccagtatccgcccccccgcccgcccatccagttgggctcgcccgggggggagtataggggaggcgcaggaggaagaggaggaggggagacgcagaaagaaggcgaggagccgaaagcggaggaaacgatgaaaaagaaagaaaggagcaggaaagagagggaaaacgcacctctttgtcggcacaaaagggcacaagcacctgacgtcgccgtttgcgaagccgacgtagagcgtcagccgggaccagtcggcgtcgcctgtcggcagggggcgcgctccatcttctcccactcctcctcctgcaataccgccggcgacggcgccgatgctaccaacgccgccgacgccgctaccgccgttgctatcggcgttatccgtcgtggtgatgtcaaccgcttcggacgacgtcgcgaccgccgggaaggccaacgcaacagcctcgcgcgagcgcggatcgaccgcgtcgaacctgccctctttcctctgggaaaagagccggacgatctggaccggctcggacgggtcgtcgtcgtcgtcgtcagcggggccgctcctgccgctgctgcggttgccgctgctggcgccgctagcgagggatgacaggtcgtattcgaagatggcgccggaagcatcgagcgcgatgagggcgtcgtgtgaggaagggtggaagagagcggctgtgaggggtggggagagggagggcgagtggataaaggcgccgaggagggttgagggagccgagcctgtgcgcctgaacgacggcaagaccaagggggaggggaggggaggacggacggtactttagtccgaggagggccttgacgcgttggacacactcgtcgagcgaaagacccggggaagggagcgtaaggattttcccctcgccggcgccttcgaagcctgtaggcgggttaggggaaggcgtgatgggctcgcatgactcgaggggcttcagaccacacccgcggcaaggaaagcgcgtcggtacgtcagctgcggttgagaaacgggaggggagaggagagaagcgggggagggacggacgttgaacgccgacgataggaagtcgttcatcccgcccgggacggcgtcgagcgctgtatgcgggctgaagagcgagatgccgttcgcagagagtgtgaggaggctcttctggagtgggttggcgagcgtgagcgacctttgtgcgaacgcctcaagcagtcagcgcacgcggcgaggggagagcagcgaggaggaggaggagaggcagggaggtgagacggacttgaggccggagaagatgggcgggtggtaggcgatgatggcgccgagttgggggattgacagcgcctcgttcaggacggccggggagaggtcgatcgtcaggaggactttgcgggcgccttcctttgggacgggcgactctgaggccaggcaaggcgattacgcctgatctcactgacggcttagcgcatatgctttgccgtcatctttatctttgcgtctcttgttgcaacaaaatccgccgtaaatcccgccattcagcttcgtccatgctgtcggctgccagccataaatgttgccgtttaccgccatcagaacgtaaacgcagcatcatgccgctcttaatcatccacggtgctttgacgatgctccactcctgcccttgccaacgcaaacgcccgtccatcaacaagcgaatttccccctggcgagcattaatacgccgctggctgcgaacgcaatcaaacaccaccagcgaaagtaacaccatccataacggggtgtaactgagtggccagggcatgagtaaaataacagcggcaaccagcccatgaatcagcaaggaaagccactgtgcgcgccaggagacgcgcaaatcagattgccacaggaccacgttcccggttccgtgtctggatgagtcggaccatcatttccagttctgcatcggccggtttaccgtgattcatcagccagttaaacaggtccggatcgtcacattccagcagacgaataaagatgcgtttttcgtcatcgcttaagctgtcgtactcatgttcgaaaaacggcatgattgaaatatcgagttcgcgcataccacggcggcatgcccaatgaactcttcccgaacccgacgacatagacacctccatcacccgcctctcgctcaagtcgactaatgggccagacatcctcctgtcggacgtcctgcccaaagtcctcgagagggaggccgaggcgctcgcggccaactagggcgtctcgtctgacccttggtgaggaagaagtcaggggggggggagagagggggatgcatgctcgtcctgtcgttcctcgcggtccttccccggtcggacgagcgagcacggagggacgctccgcaggagaacattcagcgactacgagagggaaaggcgggcgggcgcgggccagggtgcgagtcagttcctacagcctttctcccccccctctcagctcaagcagatggacagaaggagacggacaggacgagcaagcacagcagaccagtagcaagtccgaggccggcgaggacgagggcgagggcgaggagggcgaaggagcgcggccgtcggggttgttgtcgtcgttgtcgttgagattgccagctgtcgagggtcggcgcgcatccgcaggcaggagcaggagcagtagagtggtcgtccgagtcgagttccggagcgggacgggagcggaaaggcgagctgtctcttatacacatctccgagcccacgagaccgatcagtaactcgtatgccgtcttctgcttgaaaaaaaaaaagagacagcatcctcctcccccggcgcagttctacccctcgcaccgcaagctcatctactgctcgcgtaccgtccccgagatcgaaaaggccctcgccgagctcaagcgcctgatggcctaccggtccgaaatgggctgcccagacgcaaacttccgggggatcggcctctcgtcgcgcaagaatctgtgcttgcacccggacgtcagccgcgagaagaagggcaagacggtcgatgcgaggtgtagggatatgactagtgcgagtgcgtgtgagaaggggagggccgacccgggcagcgtcgagctgtgcgagtttcacgaggtccgttccgttacgctggccttttggcctgcacgtccgcccgctgccgactggctgaagggctgacgacctgccccccttccccccggccgcccgcgtcgcaggttctcggcctgcgcgagcccggcgacctcttccccgaaggcgtcttcacgctcgaagacatcaaggactacggccgccagcactcgatctgcccctatttcgccctccgacgcatgatgccgttcgtcgacgtcatcatctactcgtttcattatttgctcgaccccaaagtcgccgagcaggtgtcgaaggagctctcgggcgaggccattgtcgtctttgacgaggcgcacaatattggtttataagagacacggcgtcgtcggagggagggagggggcgaaggacacggacgccgcggctccaggcgagagatgcgggcagggcgcagcagtcgatcgacgcttggcttaagaggggcaaagaccggccgttctctcaggctaggcgagtcgcagagcacgcaggtcgtgccgagatcatacaatctgtcacgagcggtgcgagttggatggcgaacgggcgaggtggtgatgtccatgcggagaaggagggacgaccgaccgagcgaagggtgggtggttcgctcaagtcgtgtcgcaggatgagaacggcacagagcgaggagatggggctcgtctgccccgagaggagcaagagagccaaaaagagcaggcgaccgaaaagaaagaaagaaaatgagaaaatgagagaaagagactccgccccccgctcggctcggcgcctcagagcctcgctttggtccccttccgcatctcggcaatgtaccttccgctcgcgttctggatgtcgcgcttgagctgcggccggtagggcgtgagatggaggacgagctcgatgaatgtaaagtagggggcgaggacgagagctgtagaggctgtctcttatacacatctccgagcccacgagaccgatcagtatctcgtatgccgtcttctgcttgaaaaaaaaaacgccggcagcggcgccggttacgaccagcggccgattggcggagcctacggcggcgcgcacggcagcgcccctctcggcgggaccgcccacggcacgcattcgtcgacgacgggcggtggcattggcgagaagctcggcaacgctcttcctgggggtggccacacctcgacctcgacgacgacccacggctcgcacggcgtgggctcgcactcgggcgtcggctcgggcgtcggctcgggcgtcggctcgcacaacacttacggcgacgaccggacgatgggcgagaaggtcaaggatgctctgcccggcaccaactcctcaacgacgcacaacacgcactcgtcgactggcgctaccggtctcggccacggcacgcactcgacgacgactggcaccggcgccggcctcggccacggcacgcactcgacgacgactggcaccggcgccggcctcggtcacggcacgcacgacaaccggacgctgagcgagaaggcccaggacgccatgccgggcaacaatacgcacggcacgcactcgacgaccggtgctggcgccggcctcggccacggcaacacccaccacacgaccggcaccggcctcaccggcaactcgcaccagtgcgctccctcctctcctctcctctcccctctctcacccctctccttgacaccaagtttcgtgttgttctcgagcctcttgtccccggcactcagcttcgaaccgaccttcgcatcaccggtcccgacggtgtccgcgagatcgacatcaccgtcgtctccctcgcctcgcaggacgctcggtcggcctccgctcgtgctcactcggacctctcgctctcgttcgccctccggtcccagaacgccgtcgacgacaccctcgccctggccgcccgaagcaagaccctcaagtacgcaggccgggtctccgctcccttccgtcccttcgtcctctcgtccggcggcgcggtcgagaccggcaccctcaagctgcttcacgcctggcgcgaggttctcgccccgtcgtccttctcgcacctcactcgggtcctctctctcatcctcgtccgggctcgggcccggctcggtcgactctgatcgcccggccttgacctttgtctggttcaggatgtcggtcgctcggtcggtctagccttggtcgcgctcgcccgccttcgtctgtttcatctctcctttgtctcattggctcctctctcttccgcatctgttccgctccgtcttccttcaccctccgcttccgtgtgcccgcttccctcttccgtagctctccctctcgcgcctctcttccccctctcgacgacttccctcctccgtccactctaggccaagtcgcagcagcagcgcgccgccgcgcgcctgaccgcggcgccgccgtcgtcgtcgagcgcggtgggttcctttcggcagctcgagccggcgcccgctccctcggacccgcggtcggccaaagcgtcgccaaggaccgtcgttgctgagcttcagcagcagcggccgacagcaggccgtagcaaagccgccggaccggcatgcgcgccctcgccagccgccgccgccgatgacgacgacttcgagctcggcctgctcggggacgaggtcgcatgggaggatgagatcctccgctcgacctcgcccgaccgaccgcgagtggctgtccgcgccgaccagacgacctcgtccacggcaggaccgtcctcctcggtcgtcagctcctctcggccagaccgtccagggccgacctgggggcatccctttataaaagcgaattactggcgtgactgcattccgctggtgcgggatgcctatcttgccaacgcgcaaaactgggtctgggaagaagacggtaagcttctcggttttgtcagcattatggaaggccgatttctggcagcgatgtttgtcgcaccgaaggccgtcagacgcggtattggtaaggcgctaatgcagtatgtgcagcagcgccatccccacctgatgctggaggtttatcaaaaaaatcaaccggcgatagatttctaccatgcgcagggttttcacattgtcgactgcgcatggcaggatgaaacccaactgcccacctggattatgagctggccggtggttcaaacgctgtaagtgtcagttccggaccgttgtatttttccagccatgccagcgccgtattacccgcacagccattccccagccgcgagctggggagatctttggtcagcacgttcactgcgccgtttttacaaataccgtcagcggttaaatccagatccggccatgccccttcgtgaatgcaaatcacgccaggtttaattccctcgctaatgaccgctccggcaagaatttgcccgcgtgcgttccacaaccgaacagtatcgccatctcgtatgccgtcttctgcttgaaaaaaaagtagctcacccccactgtagtcggccctgcctcctgtctcgtcctacaggtgggatccatgagtcgttcacggagtagtcctgagactgagtcggccctgcctcctgtctcgtcctacaggttatgagcccatccatcgcatcatccgactcagacgactctcgacaagaaatcctgtcgaccacccccgaactgctgccgtttgccccgtcgcccgaacccccatccgcgtcgcccgctccagaagcctctgccgacgaccccagagcccctgcccaaaccaaatataaacagaagctcgcgatgcccgccggcgacgaaacgacccacggtacctccgccccgacctcgaccaccttcaagatcccggtcttcaacgggcgggacgacgtcttccagcaatggaagccccgcatcctcatgcacctcgaggatgcgggcgtcctcgccctcgttgagggcgacgaggttgagcccgcggagcccggcgctcagctcgccaaatggcgcaagagcaacgtccgagctcgccacgtcctgatgcaggcgctcggcaacgacctgacgttccacgtcttcgaccacaagactgcctccgccgcatggacgtctctcctggacgtgtacgagcccaagtcgagcagcaacctgcactcgctccttcagaagtgcagcaaaaagtggcgcagagcgacagcgtgatcaacgggttaaaagaagaaaatcagaaactgaaaaacgagctgattgtcgcgcagaaaaaggtcgatgccgccagcgtacagctggatgacaaacagcgcaccatcatcatgcaatggtttatgtatggcggtggcgtgctggggcttggcttgctgctcggtctggtactgccgcacctgatcccaagccgcaaacgcaaagatcgctggatgaactaaatcgccttcttcgttgcactgtcttattattaggaattgtgtatttgacgaagggatgatggcgtgaagatttatctggtcggtggtgctgttcgggatgcattgttagggctaccggtcaaagacagagattgggtggtggtcggcagtacgccacaggagatgctcgacgcgggctaccagcaggtaggccgcgattttcctgtgtttctgcatccgcaaacgcatgaagagtatgcgctggcacgtaccgaacggaaatccggttccggttacaccggttttacttgctatgccgcaccggatgtcacgctggaagatgatcttaagcgtcgcgatctgaccattaatgcgctggcccaggacgataacggcgagattatcgacccgtacaacggtctggggaggaggaggtgatggacggacctcctcgtcctggtggagccgagcctcgccgacctatcggttgccgatcggacaaggacggagggggggggggcaggctgtcagtcaaagtaagcgcgcgaagacccgaggtccctagcccttctagaagtgcgccgaatggcttcttgcaccagccagaacgacgcgcagggccgcttctcgtgccggagcgtgtacgtcgctcatcggcggcaaggatgaggcgcaaggggcacgagaaggggaggggggtcgaggagggcaggcgacgcccggtgcatgcggccagaaacgaccccttccctccacacagaccccgagccaaaccgagccgtgttgagagagagagcctcgccggcgaaaaagaaacgcaccttggccatcgccaacgaatactggctaagtccatgcccgagccggtctccctcgccgagctcgaccgccccacccgcggccgccctgctgagcgcatgggcgagcgtctttggctggctgacgggcgccgctcccggctcgggaagcgggagggatgtcgctttgaggttcttctgcgcaaagagggcaaaggtgtgcgagagggagccgccgagctcggccgcgctctcgagaacctgcgagcgcgaggagagggggggggggagcagggccaaaggggatcacagcaagccagcgtcttgccaccggggaggagttgtcaaggatggtggtggcagaggacgcaggcaacgcacagagtagagcctcgcgacgggtggcgaaggcggcttggcagcgagcgcgctgggagacgatgacgggggccgcgtccgggtcggggtcgtcggccggggagagggcagcgtcgacgagcaggtcggcagactcggccatggcggcccgggcgtgcggcgagcactcggcgtgcgacagtaggcccatgcctccgaggcgggcaggcagcgtcgcgaggccagcgtccgatgccagacgacgaggtgagccgcggatgaggagcagccgctcgagcagcgcgttgtcgagcgtgagccagggtgagtcaaggtcgtccgttcgaagcgagcgctgaaggtgccggaggttggcctgcaagcattggcggagcagtaagagggcctcctgaggcggcaggtcggcgagccggtcgatggccggcagctggtcggcgatgcgccggtcgaggaaggcagcgcgaacgtcaggagggccgatacaagtcccgaggacctcgaggccgttggcggcaaccgaggtaagcgacgactcctggcatttggcgacgttgagcgacaggccgggacccgccctttccccgccctcgcagcaactcctccagcacatgaacgagtcgggcgtctacaccgagacggatctccagccgtaccggacgcggctcgccgagctccggacggtcgtcgcgcatgaggtcgagagcggccagctgccgggccagatggagaagctgctgagcaggaagctcgacgattcgggtccgtcccgtcaccctgtgctgcggacgcgcggggcgtttgtgcgtttttgcaacactgttggactgaccgtccgtctgtctgctgcttctgccccgcccacccgtcgtcggacgcgcgcgcgccacagagcgcttgctcgacgcactcttcaagtcgctctcggtcctttcggtcgagctcgtcccgatccaccaaaggctcgtctcgatgcgccgccagctctcgtcgctcgctgcgctcgaaaaaccgcccaaggccgaagtcaaggcgctcgtcgaagagctccgaaagatcgactcgaagcgcgttgacgggaagtttctcgggccgggcggaagtagtgtgccgaccggccaggcgatcctgagtggactgctcgaggagtgttttgagattgcgcaggatatcagggcgctccatgacgacgacgtgccgccgccgctgaagccagtgggtttcccccctaacctccatcaacaccggcctcgtcctccctcctcccagcccaccctcgcctcctgcgccagagaggttgaccgagtccctcgtcccgcgcgagacgacctcggccgagctcgagtcgctcgcgtcgctcgcggacgagtcggtgtgccgtgggggtgggggcggtcggacacacttgaagcggtggtacgaggcgaggtcgacgcgggttgcgatcgactggttgatgtaggacgtgatggccggcaggtcgggctctgtgccaggagcagtaaaggagggggggagtcggggtcagcgcatttggtacgaggctctggtggagtcaagtgggggcgcgccatgcacgacgtccgcgagcgtcaatccctcgaggtccttggccccaaagcccgtcaggtccttgatgccgttcgaggcgtaaaggatccggcagccgccggtcgacagcggccggagcgcgaggatcgcactgtcgtggagctcgtcaatcagcagctgggcccagcgcttgcggcgggtgaactgtcggagggggctcggaggttagctcgggcgttctggagagatcgggcgaggggaagggaaaggggggagagcgggacgcacctcgaagccatccgtctccttgctcccagcagcactgctccgtcagacggcggcccaggttgacggcttcgagctgacgccaaaggagatgtcagcatgcgacgcctgcgtcgagggcaagatgacgcgacgcacctttagggttgcgtcggtcgctcgggcgagccaaccaggcgacgtcgtctcagcggacctcttaggtcccttgccggcgacggcaagcggccatcgatatggccttgtcatcattgacgacgcctctgccctgatcaagctttacctgctcaagaagaagagtgaggctctgccctgcttcgagcgttttgtggccgagacagatgtggcaggtcatcgtgtccgggtcctgcgttcggacaacggtggcgagtttgtcagcatgggcgttcgactcgtacttggccggcaaaggcatcgagcgggccctcacctcgccgcatacgcccgagcagaatggtcgtgccgaacgtgccgtacggactatcaaggaaggcatgcggacggcgcttcttcaggctgggctcggtcggtcgttctggggcagggccactcggtcgttcgtctatgctcggaaccgctcggtcgtcaacggtcgcgttcctctggaggcctggacggggcagaaggcgagcgtcagcttcctgcgggtctggggttgcctcgcctgggtccacgtataggtaggaattccagctgatctcagataacgtccatccgttgcgccagtaaccataatcggaatggctgggacttcaggccaatacctttgagttagatgagtaattgtttttagtatttccgggctaagtggagaacttgggcctctggacaatttgccaatacgttttagtgtaacctctgagtcattgataactgtctttaaagattgctcaaccatttcaggtgaatcttctgggagcacacgacaatttatggtaacagccgctaattgtggtaatgcattcattgcatgccctacttcaagtaaggtaggggtgcaggttgttcgtaaaatggcattccattgcggtgaactatcagctaaacgttgcatagcttgcttcgagcctttgcttgcttcaaccatttctgttttcagaggccctgtctcaatagccgccatttgtttaaaataggccgcagttacatcattggtttttaaaggaaaattaaattttgacagtcgctctaaagcccctgcaagacgataaatggcattatctttggttggcagcgaactatgcccccctttattacgaacctcaaggttgtaattgacaatgtatttttcactcacctggatattttgtgatatttttttccctcctccacctccgctagcgcctccgcccccgccgagcaggaccgaagcggacagcaaggccgaggctgagccggccgaggtcgatgacgagggcgtgtagccaaagcggatcgagatttcccggccgggctcgccaatcttgtctttgacgatgctgtccgcgccgagaagggcgaggggggaagggtatcagctgagagacttgctcgagaaagccatctctgccgcggctcgagagggaaaagggacggaagaagacaacgagtacgaactggtatcttccaaagtcccatgccttgcccccctccctctcgacgcgctgtgcctcgctctcgcgtgcaaacgtaacgagctggccgagacaggcgaggaaggcgaccatggcgttctcgtagcgcttgttgaagaggaagcgcgagaaggcgtcggaggagccgaagctggtcgcgggcgggtgaagggaaagggagggggaggggcgagagaggggcagaggggcaaaggcaaaattcgagagccgtcagaaaccccgagtttgaaaggcggactggctcttggaacgattgcaagcaagaaaaggacggacagctcgtacgtcgcgcccgtgttgaggtcttcgatcttcgaggtcgacccgagtgggacgccccctttctgccgtccatctcgcaacgcatgacatctccctcccctcctcgcaaagcgcccttcaaggccgaacgaacgcgtgaactagtaccggccgcgcttgacggcccaccagacgtcgagcggcgtcttccagtgcctagcctggagggccggatcaaacgggtcgaacgcggccttttcgaggcgcgagaggtaggattggacggcaacctgcgggacggggcgcgaaaagagagggaagggtcagcgcgtgggcgctgaagttgaattgaggcgaggggacgggacgcacgcccgggaggaaggccggcaagagctcctttggcggccttccttcctttcccaacccccactcggcccgactcgtcacaagctcgtcattcgccctcgtcgccacctcaaacaccgcgtccttgacgccctgcgcgccccctccgagccgggcaacatcagccggcgtaacgccgtgggcgacgcggatatcgacgggcagggccgggaggcggtttgagcgggcaaaggctgggagctgcgagaggaggttgacgaggcctgatgcgagcgagaggtgctggatcgcttgcatcgcttccggtggggggttgcgcgcgccggcggagatggagggggagggggaggtgcccgttagtaacccccggctcccgacactcgcgccccccctcgccgtctggtggcaagccgaccacgtcgtctccggctcggtcgatgacgtccggctgctcgtcgaaaagctcaaggccgacacatgggctaacggcgcgagcggcgagggaggcgaaggcggagggggtgtgctgggaaggatcaaagggtggctgagctgagagtacagtcagtggcggcttccgagaggcgttttctctctctctctctctccctatctctctctctctttatctttctctctttcatgccccttctacgattccccaagagcgagctagtggagtcggcccgccagccaggccagcaggtcatcaatacttgcggaagacgccgtgccggcgctcggattcgcggtattcgaccatgagctggacggcggcaaagacgccggcggtcgagagggcgccaacggcgatgcctttgggagcggcgggtgggggaggcagggcgaggatgacagaggaacagggggccgagggagcgttaacttacgggcggtaagaccgagggcagaagacgtagatgagacgacgatgacaatgagcgcaccataccatgagcgccaaatgccaccgagcaagtcgcgcatgccctcgaggccttccccacctcggcaccaggccatccccggtgtaatcgaatacgaaggcgcgcgcatccaactgctcgacctccccggcattgtggaaggcgcctcgcaaggccgtggccgaggccgccaagtcgtcagcgtcgcgaaaacggccgatctgatcctaatgatggtcgacgcgacaaagcagacgcagcagaaggcgctgcttgagctcgagctcgaggcggttggcattcggctgaataagaagaggccggacgttacggtcaagacgcggccgacgggcggtatcacggtccgtcccccctttggcaagggaggtcgaatcggggagcttatcccccctaccccctaccttgtactcgcagatcaacgcgacgtgcaagctgacacggatcgacgacaagatgatccggacgatcctccagtcatacaagagtacgtcaagcgtgttgtcagggctgctgcctgcgcggtgcgggcggggcaaaaggctcaccggtcgacctttacttctctcgccctcgcagtgcacaactgcgacgtcatgatccgcgaggatattgacgaggaccagctgatcgatattctcatcggtaaccggaaatacgtcccgtgtctctacgtgcgttcagccccccctcccccgtctacaccaccagaacatcccctgcggattggcatacacccgcccctgccggactgcccttagcgtttgccactgcgggtcctgacggatcgctgccgcatcgcttgcgcgcatggtgataatcacatcgggttcggcctgcacgatctgttcaagggagaccggcgccgtgctgacgcctgcctggcgaaaccaggattccgcaacgttgatcgccccaccgagatccagccaatcctgattgagggaggggcggcccgacgtagtcagcggatcacccacggcatgatagaccttgagccgctgttcaggcggaatacgttgtatgacgtcactgacgcgccgcacgttgtcctgataatacgcagcgaaatcacgggcgcgcgctaacgcatcaggccccagaatctccccggtaatcagggtgcgttccaccatcgccgccagcgagttatagtccagcgccaccacgcggatccccgccttgcccagcgtatcggcctccggcagcggcgtactttgcggcacaaacaagacttgcgcgcgcatagccaccagcacttcactgttaatgcccatatcgccgttgcgcgacgccaaagccgcctgcacgatcgacggcacaaactgacggaacaacggcgctgcgcttccgccggctcgccccgcccgcctccgcgccccctccgaccgtcagcccaccacttccatctcattccctgccatcctccctcatccatctagtcagcccgccagccagcgaacacagacacgcgcccgggcgatgcgttcaccctctctccttcccatgacggctgcgtcgttcctcctggctcttgccggcggaggtggcgcgctcgggggcatccagcccgtcaaggcttggtcggctgtcggtccgtccctcttcctttctccctgccctcggcctcgtcggctcgctttgtctcgtgcgagtgtgacgagtgaggttcttgtagatgctggctgagggagagacaggcgagcctacctagcttgggttgggagaggagggatgggctggcgtcggttggaggctcggcgagcgagcgagcgggcgagtagggaggagagcgatggctggctgggccgtcgaccgaccgaccaaccccggctggactactcgtccgtcgtcggcccgcttgcttaggccaggtcagccgcgcgacagctcaccggtttggttgagcggcagcgggcgggcaggtaggatagggggaaggagggtgtccaggctgcttggccggcgagggagggagtgtcgttgctggctcgctggctaaggcctacatcgaggaatcaaccgaggctcggctgttcgacttcctcgcgctgcccaaggtaggcctagctccggcgcttgagctcgcgacgtccgtctcgcctgctgccggcaaagctcatctcgccgcgtttcctgccgtcgactggccgtccccctcggtcgctcggccgtcggagtcaccgctgcctcgtcggatcgccatcgccgtccagcgtggcaagctcagtcgagccgctcgcctgctcgctgaggactcgtccgttgccaacctcacgcccgccactatcgccgcccttgcgtccaagcaccccgtcggtccggtctcgcccttcggccctcggtcgggcgcggctccgtcgtctttgccgtcgcttgacctcatcaggcagtgctttgactcgttcaagccagacacggctcctggcgtttccggttggacggccccgctcctcggccacgctctgggcaacgccgacgtctcggcttttgtcctgctcctcacacggcaggtcgcccagggcatcgctcctggccagcagctcctttgcgcgtcgaggctcacgccgctcctcaaggccgacggcggcatccggccaatcgcggtcggcgagctccgaggagaggcatacccttcagacgcggtgggcgggggaaggccggccatcaggcaccagcactcgtacggctcggcctatgacgacgaggcgattggagggggcgcgtacgacgacgacgattcggaccgggaggagctcggcaccggcggcggtggtgcgggcatgccggggtactcgccggcttccgctgctgcggcggcggcggcttcccgggctggaccttcgaccgctggaggaggaggaggaggaggaaggccgtacgcccatcaaccggcaggaggccaccacctttcctcaggcctctacccgacccacccgaccagcggcacaaacaacaactacccgcacgccccgagccagcagcagcagcagtacccttcgacgacgacgacgacaacaatcctcggcaaagaccacccgaccgagctcggcaagaagtcgaaaaagagcaaaaagtcaaaggaagatggcaactatgtctgcgtgacgtgtggccggaccgactcgccagagtggcgcaaggtgcgttagtgcgcgtgtgtgggcgcgggtcgggtggtgttgaaggttgtggaagaggttgctgacatcttggattctttcgcgaccattctcgtccttgcccccccctcccccgatgggtggtgggaaggcgggtgagcggcaagttggcgggatcaagcgcggagagagggtaacagccaaagcaagggtgagtcggcgattgcgggcgacgagttcggcgagtgggccggccgttggcgtgagaacggcaacaacggggtttagggcggcggcgggtgagtaaaggaggaaggccaccggcagtggataggcggcagagattgcaagggcaagggcagatggcggcgagcagaccggcgcgttggcgagaggcaggagggcgagggcgagcgggcggaaaggtcgcaggcaagggcggccggcgagcgagcggacggacaggaggagggggaagcgacaagcgacaaggagcaaggacgtcagacagagtagtcaggcaatcccggaggttgactgaacggcccccgggcctttgtcgaaaggcagcaaagaagaagaagcaacgaaccgtcccgtcctttccctcgcccagcccaaccgccttcaacagcccccgctcctcgatattctcccatcggccctcccttaccgccgtccgaagcgcctcgactggcgcgaggtcgtatgcgtgtcccgattcgcgctcgagtaaggtggcggattcactgggtgggcggagggaaagggtttaataaccttgcaaaatttgtagcgtgtatcctggaaatacccctgttttcatctgtacatggataaaaaaaagtatacaatttttaactgggtatcttaatgattatcggttaagatgaacactttaatgatactatccggcaaatatgacgaatcagaaacaaaccacccattttggttttaaatcagtagactagaatgagaaagaaaagaaagtagcagaagtatttcattctgttgctaaaaattatgatcgcatgaatgatctgatgtccttgggaattcatcatctctggaaacgctataccattgaattacgtcatgttcgacctgggcagagcgtattggatttggccgggtgcagtggtgatttaacccggttattatcgcaaaaagtgggcgactccggacaagttattcttgccgacatcaacgcagccatgctccatgttggccgcgatcgcttgcttgatgagggattatttaaaaacattcgttatgttcagggtaatgcgcaatgcctcccttttgcggataacagttttcattgcatcactatggggtttggacttagaaatgttactgataaagacgaagcgctgcaatccatgtacagagtatgcaaaccgggtccatccccaaacacaccacccccagcccccaaaggcgcgtgcaaaggaaaggccgagggcaagcgcgttgaggaacgagaggatgacgaggacgagggtgtttggagagagcggtgatgatgcagagcgaagggaggagtcggacgaggacgggatgtcgtccgacgacgacgacgacggcggtgtcggcggcaggggatggaactcgcaagcagccgtcgagcggcgccgcgctcttaacgacgctgccgcctctgagctcccctccgcctgaatctccgcagcttttctaacgaaggccgtccccaagagccctctcgcaaatgccggtcgggagaccttcgcaagaaccgagagaaggatcgtccggcccaggagctcggcgacgattgacttctcgagcggggtggagaggcgtgaggggattggtgctgttggggctgtcggtgctggagctggagctgctgctgagggaggcggttgagcgtgcttctccactggcctcgaggaagaggccgccgtcgaacgcgagtcggacacctgccgattggaagagcgcgttggctcagccgccgggcgtgcaggcgggaggaggagcgggaggaggtggcctgcgagctgggtcagatagagcaatctggcccttgctttctgttcgccgacccctttatcccccacacctcacctgctctcccctccccttgtgaggatcgtttcccgctcccttctgtccttcgcttgaaccgtttctctctttctcctccggctccgcccttgttgttcggcccccctttgcacccctttgtcgtcttttgccttgcctgaccctgccattaaccacccttcctgtagcccttcgtttccgtcccccactgtctcgggccctggcaggggccctcgaccttgtctctcatgagagtctgtctcggcaagaagcagcgccgctttggttgcttacaagaggagagtagcgtttcgcctgaagcggtttagtgataagagcaaagggctgccactgaaggaagaagtcaggcccatgaaatcggtttctaaagcgcacccacccaacggttttaccctccctttctaaacctttgcttggccgccgccgccgccaccaccggaaatgaagtcgcgcatgctttgctgcttcgcatcaaacgcggccgagccgatcccgccctgctggcgcttgagacctgcgaggtgggtcgtcgagttaacggtctcgatctggaccgtcagcttcgggggggtggtgtctcctgtatcgacatcaaccacgtgctgaaaatggcgctgattcacgacatcgtggagatcgacgccggagacgtgctggtgtatgacctgaaagcccgcgaagccattcaggaacaggaacaagccgccgctgtgcgcattttcggcctgctgccgccaccgcagcgcgaccagtttctggcggtatggcacgagtacgaagccggagacaccgccgaagcgcgtttcgcgctgatgatcgaccgcgtaatgccggtgctgatgaacctgcacaacggcggccaaagctgggtggagcacggtatccggctggagcaggtgttgagccgcaacgcctttatcagcgacctcaacccggcgctgtggagctatctgaaacagcacctggaacaagcgcaggcgaagggctggttgaaataactgaccgtcgccaaccgcatgagcggcgccagaggccgctcatatcggcgaacaaaaatgtctgtaccggtcagttttttgccgtcatcgccagcttcacgcccagtgaaataaacagcacgccaatggttttattcagccagaaacgcaccgctttactgactttcagcttgctgctggccaacgcggtcgacgcggccagaaagtgacaccatgatccccaggcccgccaagccccgctcgtcctcctcctcctccctctccttcctccgcctctcctcctccgcccgatcatccacctccgcccactttacagcccgccccctccgctcctccccttctgccaaacaccgctcgacgagcaccgcagagcgcgtcgcgcctgccgtctgggatttgacggaccgtgcgcggagccagaaggcgcctggcgaggagggagcgaaggccgggagcgagaccgtgtagtagccaagggcgaggtggacgtaggacgccggcgtcgtcggcgaggaggagggccggagcgagggccggaggttgagcgcagagtagaacatcctgcggcgccatttcacacaagcaaagcaagaccgattagccctcctgcacaatcatcacacgcgccagcgctaagcgagaggacgtacatcggctcctttgggtcgagcttgccccctcctcgcgcacggatccatgcaaggttgacgacggcaaagagcgcgctcgcaaacgtcacgccctccttcttgcaatttgccagcagccgggtcgtttcgccctcggtgaaggctcgggttgggacgcgggtcgaggctgtttgccggcggggggtggaggacagcccgggcctcttcactcaatgctgccaggcgtttcacttcatcctcagccagtttcaattggcgttctgtttcagcctgctccttctctatctctttacgtcgttgttctgcttcctgaaaagccttttccgcagcttccgcttctttacgggctttttcttctgcttttgcaaggcgcaaccgctctgcttctgcctgcatcgctgcattattggcatgagccaggtcaataacctccggatgagtggaattatggcgaagcgcctcattcacaatatccttcagatgttgagtcagcgcatcccggtttgcttttgctttagcctgtgcttctgcggcagcttttgctcgggcagcctgttctgcctgcgttttcttcaattgagcagtagaccatttagctgtggcatgaatggctgcagaactttcacttttgctacctccagttccaccaccaccgccagagccactcccgtctggattaccattcaaaagagtaatgattacctgccccttatcatcataaggaacaccatctttatagtacgctacagctgtttccattataaaatcctctttgacattaaaaacaaatagttaaaagcaacatactgtatatataccgccagggtttcctctggcttcgccctattcaggcatagttcaccatctttcgggtcccaacagctatgctcttactcaaacccttccattgacaaacttccgggtcggtcgatggtgcacgccacaagggcgttcccacctgcattcactttcatttcgcggatgggttttcatcacccaaacactcgcatagatgctagactccttggtccgtgtttcaagacgggccattgaaaaccattatgtcagcatccttggcacgaagccgcagtcctcagtccccagtggacgtattacaacaagggctataaacactccccaggcagaacccggaaagccaccttcccttattctttttctgcccccgaaaactgatgctgacctaccacaggttcagagtgcatagtctcgcgaagagactactgatctcacccaggtaagactgatttccaatgcttccctttcagcaatttcacgtactatttaactctcttttcaaagttcttttcatctttcgatcactctacttgttcgctatcggtctctcgccaatatttagctttagatgaaatttaccacccatttagagctgcattcccaaacaactcgactcttcgaaagcgcatagggggaggggtcagcctgcttatccgagggcattctttgaaacagcccgccgacgcgaagtccctcacctcgctctaccttgacggcgcctgctgctgctgctgttgatcgtgccggcgtcgcgcttgaccgcctggcattgttcgtctcgctctccctcgtccgctcgcgctcctccctctgcccaccactcgccctcccggcgcctctcgcgctctggtttcccgccgccgcccgctcgcgctcgacaagcgagtcaacctgcttcctcgcctccctcaccgccttgcgctttgccctcgcatggctcgccaacgcctggagggtcgtctggagctggacaaccgtctggagcgaggggtggatcgcgcctgcggttgcgggcgagaggagcggaatgaggaggggcgtgtagggcggtggggggtcgacgagagcggccgccgaaactgatgttgatggaggagggctggccattctggctggccgggtggatgagctggatgtatgctggagggaggatgatggtcgaaggtcgcaggagtcggtcgaggacgagggcgagaccccccacacgcgccgaccctcctgttctgcatcgccggcctcccgtcgtggtcgccgggaggaggggctggaaggccggccgagcgccttcgcccccgagcttcgagctcgagctggagcggtagacgacgcccggtccggcatgagcgagcgcgccggctgaccgggcagacccgggcgtcgcgggtgtgccttcgccatcggcgccggacgagccgccggagggagggacgtcgtccagcgcgtcttcgacgtcggccgtcgcgccgctgctctcagtcgtgctcccgcgtcggtcctgctgctgctgctgctgctgctgctgctgctgctgctgagcggcggcggcggcggcggtggaggacgaagagggaatttcgacgcgtcgcgtgcctgagacgagcggggcagcatgcgtcggcgaggtgccttccgtctggggccggaagggcgatgtcgatgatgggtggccgacgttgtccatcgtcttggtgctagactgctttggttcagctgacgaggtgaggtgagatggtcgtcgggagggggaaggcgaggcgagccggcgtcgagcgtcagacgcgcagcggggcggagttccgttcccctcgctcggccagccgcacgccctttcccgtcagccgtcgtcgctcgagcaaagtcagcacaaagcaggcgctgccggaggccgaggcccaggacgcccgcgtcgttgaggaatcgacggtcgatccagcttcgggcgactgcggaagttgctgatggtgccgttctcggtatgcacggccgaagtctgatgagaagaacgaggggggcgagtgtcgaaagtcagtgctgacctgatgcgtacgacgaccgccctagcagcagccctgcgccagcgttacacgacacctttgaccccttaaccgccaatcgacaacatgcgctgcggacgcctagcagcagaatctttctctcaccgtcgtcgcacgtcgctgctcctcggccgtcacgtttggatcgagtggtcgaccagcctggttgactacatgcgcgcgctcaggtgacgcgacccggggacgctgacacgcctcgtggagcacatctgacactctcgctcgagcgacgacggcaggaggcgaacggtgcgcagagagaagagacgagcacgtacgagacttgggttgacggtgcaggcttgcggccagtcgtcctcgaccgttgccgcgcggggcggtacgtacgcgtacaggcgcgccggccgcgaagagtagccctcggtgcgcgcaggcaggaaggcgacgagggccacccaaatacacgcccatatgatcggctatctcgcggctgtggatatggaaaaacagcaaatctccccggcgcaggtcgttgttcgccacaatcgttgcccggcgatagtggtacatctcattggccgtgcgcgggagcttagcctcaaggatcttgttgtaggcataaaaaaccaacccgctacagtcaaagcctttatcaggccgcgtaccgccccagacgtaaggcttgccaagctgctgctccaggcggtgaatcgccacttcggtaatgttatgcagatggtcgctgcttaaaaagtggttgttttccgccagcgcctgccagcgtctgtcactcgccttgagcggagcaggaaaccattctggatgctgttttatctgctcccggttgtgctggcgtagcgcccttttgctttcggcattgccttccacaatatagctggcctgctttttcagatgagtttggtactgttttaataaacgcgcacggttttgcatccgctggcgggcggcgtagctgaaagagatatgtgatgtggtggcgctggcaaatgaagaaaacggcaaacaaatcaacagtaatcccgacaatacaaaggatggaatcgacggcaaggatttctgatgtgggggctaccgtgtgtgaatttttccgcgcgccaccgccacaaaatggtcgctcttttctttcctccctccggtttgcaggagacaccctatgagttttgatccgacgggttacaccctcgcccatgagcatctgcatattgatctctccggctttaaaaacaacgtggactgccgccttgatcagtatgcgttcatttgccaggagatgaacgacctgatgacccggggcgtgcgtaatgtgattgagatgaccaaccgttacatggggcgcaatgcgcaatttatgcttgatgtaatgcgcgagacggggatcaacgtggtggcctgtaccggttattaccaggacgcgtttttcccggaacatgtggcgacccgcagcgtgcaggaactggcgcaggagatggtcgatgaaattgaacagggtatcgatggcacggagctgaaagccgggatcatcgcggagatcggcaccagcgaaggaaagattacgccgctggaagagaaggtatttattgccgctgcgctggcgcataaccagaccggacgcccgatctccacgcatacgtcgttcagcacgatggggctggagcaactggcgttgctacaagggcctacagcagcaggcacaggcgagcggcggtggaggaggcggtggagggagcgatggaggaggagggggaggaggaggaggaggcagcagcagcgggggttgttgagaccggcgagggacgaggtcgggcactggacttgccgcccgcccttccggctgttgattgacgaagccatgagattagtcagactgcaaagcgggccggcggccatgcttgaacgggcaggccgggcaggcgggcgggcatgcagcgagcggcgtttggcgcgtgtgaagggctagagatgaggatggaccgcaatctactctggccggcccagactgaatcgatcgatggatcggcggggtaagcgcgcccgaactgccccggctttcttgctggcccgtccgtctcgcccctgctgggcccgccgtttgccgttggcttgcacaaacgtccggatcgagcgaggtcgacgtcgatctttcaatcgaggctccgcaggggtttcggatgaagagcgcatcgatggcgactggttttttggtaaggtagagggagcgagagaggagcgacgagaggaagcaaggggggctaacagcgagcgagtagtggtacatcgtgagcggggagggggtcccatccggcctgctggtacgttaagcgtgcggctctagaggacgcaccagttgagccgccttgccggagcggtcggccgcaagtcggcgccgttcggctgttcggccggcgggctggccgaggcgcgcggcacgtgccagagggcacctggacggggtgagggagggccagagggccctcaaggcagaccgggacgaggcgagcggcaggaggaggtgctggtggctgctaggacgagctcgagctgcccgagctgcgtctggccgagctgccggaggtgggaggggagggcgaagagagggaaggtctgccggcctgccgggcgggccgagggactgacgctcttgctcctcctccttatcgtctcgccaggatggatgtcggcaggcaaggcgaggcagctcggccggctgcctgctctgtcggcggctgaccccacagctgacgccttcgtttggcccgggcgacgcgtgaagagagggagaggggggagaacgcgcaaggcacgcgctcttggtgggcaggcaccctgacctcacccaacatcgcctcttgctgccctcccagtgacttcctgacggtcgcttgtatcggatccttgctcgctgacggtcgctctgagtcggccgccttggtcccgatctcgccagagaggttgagcgacggcccgcagtagcactctgccagtcgccatcggccgtcgttcgagtagagtagagagagcgagaaggaagcaggaagggagggagcagggaagccagtcagcgctctgcgccctctgctcggctaaagtaggcagcctccgggccggacacgaaccgttgccgttctggacgccggcgtacgcaaagcccttggcgacgcacgcggcgatgcagctcgccggcgtgaggctcgctccgaggtcaggcttcagcccgctcagcaggcgagaagggccgtcgacgaagcctgcggcggacagaggtaacagtcagcctcgcgaccgagagcgcccggcagacgactgtgggccaggagcaagagcgagggcaggggacgtacagccttgcgccgtccagcccgaggggagtgtctgcgatgcaggcgccgaggcgctcttgtagagctggagccggtacgagccgccacacatctgcgacttgtcgcccgtgcaggcgacctggcagcctgagtcggccgccttggtcccgatctcgccagagaggttgagcgacggcccgcagtagcactccctccctccgacgacgcccttcctccctcctcccatccgtcaggtctcgccggcccgtatgcgcccagaggtccatccgatggccgacctccctccgcgcacactccagtccaaaacgacccccgccggcaacgaggacgacgacgacgaaggggacgagcggcgcggcctgctcaacgagcccgccgccgacgacggcgacgatggccgaggaggcgcagtccacccggcgcgccgtgcgtccccttctatctcccatcctcctccgctgggaaacaccgaagctgaccaccgcgtgtgaacggggtagatgacgagctgttgtcgaagagggagagactgcggatcggggggtcgttctttgtctttgggctgatcaacaagttgcgtttccgtgccgtcgtgccctccttgctcccgcttctgctctcctcctcctctcctttgctctcgtttgaacgagtctcgcatgctcagagaagagagagctgactgtattgctcctactctgatagtgtcctctacgtacgtcccgtcctctcaccttcatcatccctcaccatccgccgcccgcgcgccctcgccagctcagctcccccctcctgtctcttatacccaggtgaccttcttcaccggcctttacaaagtctgcgcttgggactttatcgtccccgaaggcggctacgcggacgaggacgtgcctattgggtttcgcgagcggatgcggagacatcggcggacgattgcgcggggctatgcgcgtttgcggaacgggcagcgacgtaggggagtggaggaggaggaggaagggggaaggtcaggaatgggggagctaaagagggcggttgtggatggggtggagaaggccgagccaacgtcggtcactgaggcgttcgagctgcccaaggtcggcggcccctcgaccgccagcagcaacggcagtagcccgaccaagccgcccgcaaacaacagcaatgcaacaacggccgacgtcagccgactgacagccaagcccctcagcttgacaacctccatcactcgccagctctccgcggccgagaccgagtcggtctcgtgtgcgccctttcctccgccctcagggacgtcttcctccggcgggtctgctggcgggccgtacaaccgcaaggagcggggggacggccctcgccgacaacttgaacctatccccgcctcgcgcgcccactcgccttcccccggccggcggcgcagtggcctctggcaaaggaggggtcggaaagtctactgtcacagtaaatcttgcagcagcattggcaaaactgggtgctcgagtcggcattttggatgcggatatttatggaccaagcataccattgatgcttggtgaaacaaaacctgtacaagtaaaagataattgctacataccggttgaagctcatggcatgcaggccatgtctattggctacttgaccgatacaaaccaggcattaatttggagaggtcctatgctcgccaagtctttaatccaaatgttagacatcactctttggaatgaattggattatttattcatagatctaccacctggcactggagatattcaactcactttggtacaaaaaattcctttaacctctgccatagtagttactactcctcaaaatgtcgcaactttagatgcccaaaaggcaataaccatgttttccagaacaggcattgacgtacttggaataatagaaaatatgtccacccacatttgtagccattgtggtcatcaagaagcaatctttggtagaggtggtgcagctgcgctgtgtgacgcatatcaatgtacattattaggtcaactgccgctggacccccttttccccttgcatcccttagcgtttatgagctgacagccctcccgcgcttcccgcctgccaggccgatcgacgtctttgtccactacgaaggcaagcgcgcggccgacatcgtctcctcacgatatgccgtccgaagcctcgtcacgtccgaagtgcgtttacatcccctccccttcccctgccattgaacacgcgcgagccgcctccgcaattgaccgagctgacaaccccattttggcacgcgcgccacagatcgaagccgagctcctgaggcgccatcaggcagcttacccagaagcggccgattcggcctctgccgcttcgctctacacgaagcggtctgctgccaggcccgctgcggacgggctcgtcgaccaggtcccgctcgactttttcggtcggccgctcaccgtcgttggcctcccgtcggacgccgccgacggcaagggcgccaaagacggcggcgagacggaccgcgagagggaggctaagcgcttccgggtgttttacaagtttcacgaggggagctcgacggcggtccggaagcctttgcggatgagtgcgctcttctagattgcgctttcgtccccccccccttttctggaccgcgcgcacttcacgcccccttcttctcctcgtcgtcgtcccccgaggcaggatcgagcccgagttctctccgagcgcgagcaatggcagctttggagcctgagttctggaagaaggaacggacgggcgggcgatggagcgggtcggaggggatcaggcgaaaggtcgagtttcaagaagagccgcggtcgctcgagctatcttcgccgggggacgcggaggaagaaggaggagaaaggggggaggagaaggtgaaggaggacgaggaggaggaaggacgcacctttgtgggctcgtccgagagcttgacgcactcatgcccatcgatctcggcgagcttgatcacctgcgggcgcgaacgggcggttgggcaagaagggagggaggcggagcgaattgtcagctcgcgttcatcagcggccgcccatgccaccacccgtcagaggtcgactgagaaccgaggagagcgcgaggagccggcggggggaggaacgcacgatgttgagcgcctgcgacggcttgctcgggtcggacgcttgggcaaagtcgtttgtgaggaaggtgccgatgccgaaggaggcggacaggtggagggcgtcgcaggcctggttgagccacaagcccgcggcggcctgtcgaacagcgccaacgccccagtcgggcttcgctcgacgaaagacaaccgtcggtcgtcgaggacaaagacagagcagcgccgagttcccaatctccgaacaaagtctctccacctctcggcgacctctctccccttgctcgctcgttcgctcaacccgccctctctactcccgtccaagtaaccccgcctccgcctccccctctttagcagcacacgtcaggcccgtccgacactcggttcgtcccagcttgggacggcgagtcgtcctcgacgctttgtgaagggactggccgagtttgccgggcgtttgctggcctcggtcgctgacgacgccaaacgacgacgacgtcgtacggcaagagcgatcgacgagaggtgagctcggggtcgtctgcctgctcgctcgcaccagcgcctaaccgccgtgcagcttcggtccccatcggcctctcacgacgacccccgtctctgcccgacctacactcacttcccttccctcatctctgccagccgcccacgtccgttaagcaagaagcgaagggctcaagcaaggtgggggggggggggcaaggaacgtaccgagtgagtacgactctggccggggcggctggggccaccagcgggctctgctcgagcagcaggcgcaggatcgggcgcgcgaggagctccagtaccaggtctatgcgggcgtgggcgggacgggcttggagggcggggatgtgccggtcggagagggcgcggagagcggtcagtgcctcttccttgccagcggcgtccggcccttggagctggagcttggacttttgactgacgcctttcctgctccagtgcacgagccgccccagaagcgcgagcgcgacgacgaggacgaggacgagcacggccgacggacacgagacgtgcgacctccccatgttttcgcgcatctagcccgtgcctgaccctgctgctgaccccattgcatgcgctgcattcctgttctgtgtgcgaacagcggagagacgaggacgacgagtgaggtcatcgacggccaggagtatcttctaccatgcgtctctcgttcgacctccaggttttgcccttgtcctaactttcgttaagccgtcaagaggcagtcgttgaattgccatcttagaggataaactcctcaacccgataaagtccctgccactcaacctttgcgcccttcctccccaccaactgatcgcccacctcgccccgcacgcggccctcttcctcctcccgagcctcacctcctgcttttccggcgcgaggttcacacagcggcagagggtgaacctgccagagtgcgggacggcgaccgtcgtcgtgctcgattggttcaactctggccggtccgcctcctcctcctcttcctcctcctcctcctcctcctcatcctccgtggcagacccgccctggtcggccgagcgcatggagctctacctcgagctccactggggcgcccaacttggtctactcgaccgacttgtcctcacgccttcctctgcgccctcgctcctcccctacaccctcttttgcacgctcaccctcgccggcccacgtgtccaagctttgatcgagcgcctcgagggcctccagaaggccgagggcaagattacgaggaatttaagggagaggccgaggatgatgtggtcgttgtcggtcgtggagccgagagtcgaggggatggctgggccgccgccgaagccagcatcgcctcctcccactcgtcctgagactcaagccagcaacgcccacgctgctgctccctccgctccatccctccccctcaaaccgggaaggagggaggaaagcaagtaaggaagcaaagacaataaggggctgtcagtcctcgaaacctgcaccgcaagtaaagagcgaccgaaaccgactaacctcctccgccaaccttttgaagtcgccgtaccgtctccaaacaaacacgtcggccctgccctccctcctcgtcctgacgaggaactcctcatgctccctgctcctacccttgccccctcccttgatcgcccgaacgccgacgacgttgatctcgaacccctcgccggcggcctcgcccgggcgaggccggtcgagtgcgacgcgggcttgggcggaccgttcgaggagagcgaggtcggactgggtaatgcggacgacttcttcgcccgaagaaagcttcaaagccgacccgagtaggagcgtcagatgcttctcgagctggtcaaacagcctcctgcgccgggcggcgtcggcggccgccgagctgtcgccgtcgttttcgaaggctggaatcgaggagggcgcgagggagagggcgaggaattgggagagggtcggctggactttttggggccagaaggaggggggggccgacgagaggaagctttgagagcgggcggacaaggggggggaagggaacacaggagcgaggccaaccttgctcgctcgcgatcgccctcttctcgatccggacgcgtcgtgcgagcgagccgagccgaaatggggcgtgtcgtgtgcgcgcgtgacgctggtacgcttctgccgggcgcttggacgttgatcgaaccgagccgagtcggggtggggtgggacggacggacggccggggggatgcgttttgacccttccgacccgaccctgcccgaccgaccggccgagctagtcagccagctgggctggtaggcaagaccggccgcgggacgccgtggccagtccttgcgcaagcaagcagggggaaggagggaggcggcctcagcgtccctctcggcctcgggcagagcgtcgctcgtctgcctgcctgccggtcttggtccaagcctggtgacgcccgcttcgacgtcggctgtggttagagagaaaccggctctctcgctcgctcgctggccttccgtccttatcggctcggcccagtcgcgtgttcagcttgatctgcttcgctacctttctcccccctcctaatttctccttctgcacatccctctccgtatgctcagaacgaacgctaactcccccggcgggacgagacgatcgggaagagacggtcagcgccgaggttgcctctgatgtctagcggtgtggagtagcgcgagaaggggactaaccggtcgcgcgagtacttctccaccttgacctggacgtgctcgcctcggcccgtcgcaagcagcaccttcaccagcacctcggccgccttgtcgtccgcgtcccagacgtccaccctctggcggtaaacgcgccgctcaaagacctcctttgacttggcgtggacgaagggcgagcgattggacgaccaacgggtgagctcggtagggagcgcgagggggccggtcacgggaagttggagggcgagggccgtgtgacgcgccatggcgccatactgccgggcgcgacgcaacgaggacgtcagtgcgaaaaagcgggggtgagggtgggactcgaggttagcgagagcgaggagaggcgggacgcacaggccggagcgaggcgtggtcaaaggccgagaaggtgatcgaatgcgtaagaatgtcgtgtttgatcggaagtttgggcggctgaggggtgcgagtaaagggatggagagcgtgagcgaggagcgaggattgaggaggagcggggtcgaccccttctggtcccctttctcgtatcaggcatccgccggcctcctctcggacgcaaagcacattgccgcccgcgcgcgcgaagagtgccagaactaccgcgacgtctacaatgcgccgacgacgctcaaggtgcgccactctcgcctgctgttcttcccactttgcagccgctggcgcgcttctgcatcggcgtgtcatcgggccgaggagggcaaactagagagaaacttcctccggccgattcgcggagagaaagcgcttcgaaatattcgctgaccccccgtccccccgcgcgcactccctctggtcgggcaggacctcgtctcgcgcgtgtcgatgtacctccaagcctacacgctctactcgtccgtccggccctttggcgtctcgaccctgctcggttcgatcgaccggtccggcccccagctctacatgctcgagccgtccggcttggcgaccggctatcgggcgacggccgtcggcaagggcaagctgctcgcaaagaccgagttggagaagttggatttcgagcggatgacaatgaaggacgcggtgatgcacgcggcgaggatgtttgtcccttccccctcctcctcccctgtctcgacatattgtattcagttttgaatgtttgttcattcaaattaatgggcctatagctcagctggttagagcgcacgcctgataagcgtgaggtcggtggttcgagtccacttaggcccaccattaatttaatacctatttgggggcttagctcagctgggagagcgcctgctttgcacgcaggaggtcagcggttcgatcccgctagtctccaccattatttgtacattgaaaactagataagtaagtaaaatatagattttaccaagcaaaaccgagtgaataaagagttttaaataagcttgaattcataagaaataatcgctagtgttcgaaagaacactcacaagattaataacgcgtttaaatctttttataaaagaacgtaacttcatgttaacgtttgacttataaaaatggtgggaacatagattaagttattaagggcgcacggtggatgccttggcactagaagccgatgaaggacgttactaacgacgatatgctttggggagctgtaagtaagctttgatccagagatttccgaatggggaaacccagcatgagttatgtcatgttatcgatatgtgaatacatagctcgtataggagacatccctagatgtcctcctgtatacccttggtgtcccctctccatgaccgatcggtcatggagaggggacaccaagggtatacaggaggacatctagggatgtctcctatacgaagtataggtacaccccatgcggggtgtgtggtgactctctctccatacggcttcgccgcataggtcggtgtcgccacctgtgggtggcttagcgcacccgatggagccggctgggccggctcacccctcgacagggccgaaggccctggccgagcccgcagggcgaggcaacgcctcccccgtcggcgcagccgacaacatggggttccctagcccggctagataggcgggcctccaccccctgtggtggggctaaatcccccccgtcggcgcagccgacaacatggggttccctagcccggctagataggcgggcctccaccccctgtggtggggctaaatccccccccgtcggcgcagccgacaacatggggttccctagcccggctagataggcgggcctccaccccctgtggtggggctaaatcccccccgtcggcgcagccgacaacatggggttccctagcccggcggaggggagcgggccggtgaaaggcgagcctcggaaaccaccgctggctacaggtcgggcgaacgaacgggcgggcgggcgagcgggcgatgacgacgacgacaacaacggcggtggcgcaggcaggcatgcaggcatgcaggcaggtaggcgtgcatgcaggcattagccagcagacagccaagaaagcgaggggttgttagagccagtcgaagcatcgccgccagcccgccagccagcaagcaacgaagcaatagagaggacaggacggaccgatctgctggtcccagatccactcgctccatcccaccctctcctcgaccgtcgtcgcgctcgccaggacgccgaggaggtcgagcgctgcgaggcagaagtatgcgatggtcatcctttgcgcgcccgacgaggggtcgtcagtcccagctcagctcggatcggtcccagctcgcgtgacaaaccggttcggatcgtgcccctccgccgaggctggcaaggcccgcaggcagcggaggaggaaggccgtatgacgcttgagggtgagagaggccatcgatgacgtttgaggggagggagggagaagagaggagggagggtgagaccccgaaaaaatccaggctgctggctgacacgatttctgcggtttatctcgatggctacgagggcagacagtaagtggatttaccataatcccttaattgtacgcaccactgaaacgcgctgaacgcgattctgacgcagacaccgcaaaaagagatgttttaccccggaaaaacaggaaggatgcgtcaggatcgttttcagctctctgcatagctatgcatgaaagcgaatggagatcactttgggagcttaccgtgttcataccgtctgttttcaacagttttctccccgggaagctaatctgccataagcctggataacagggcacggtgatactccgtaatagcgatcagcacctccgcatactccctgtccccgacacgcttgccgtcgataaagagttttttctgtaacgcccccagtctcataacttctttcagtacccgatcatcagtcagtgagttaactttcttaccgagagctgccgcccgtaaaaaaccggaaacggtcttgccgcattcagcagccctttttctgatttcctggtcttcttctgccgtcagacgaacagggcgactgatagcccgcctgcggacgtcaaccaaaagacgccgctggcaatggaggactccgagtaccctccgtggctgtggaacctgattggcgaggggcgggcggtcaacaaggcaagcttgggcgcgcaggatgagtcgaggggggtcaagtggggcgagaaccagtcgaagcgggtcgttaggaagacgtgcgtcctgtctctcttgtctctctgctgaaacgaggtgttggcctccacgggatgacgagctcgggcaacgttgcgagcagcctagctcccctggccctcctgccgcccgcccgaacccaccgtctccccgtccagaccactcacgctgacctcccttctcttctcccttcacccaccgctgccagcaaccgcgaggcgatcaagacgtccaacctgctcaagagctcatagattcgctgccttctctcaatgcaaccctgccgtcgaagccgacgacgaagggcctggcgctctcgcaaggcgggttttgagagctgacagactggcggttgccgggcgggtcgcaggccggataaggttattggaagggttgcaagggacgagaatcgagggggttcgcgctgacgatccgagccgcaaaggggggttggcaggcctgcagagggggggcgatgacagagggtgagcgagaaggaagggacacctctcgctggcgggagagagggatagaagagaggaagcgctcggtcggcgcgaggggcttaaaagcggtagctgggaggaggagaggggcaagagggtcagcagagggagttacgaggggcaggagagaagtcgcactgcttctcgtccttcttgtcgtccctgcgagcgggcgagcgagagaggggagaggggtcggccagcgtaacgcagagcggagcagagagcagaaggagcggcgcacttcttgtcgtcctccttcttgtagtcgtagccgtgctccctgtagcgggcagagagaagagggcggaagggtcagcgacgcgacagagggcagcagagagatgaagagaggagggcgcacttcttgtagtcgtagtcatagccgtagtccctggacggcgagaagaggggtcgagtcagcgtcagagggaagcgagcagagagcaagacgggactcacttcttgtcgtccttcttgtcgtcgagcaggacgaaggcgaagatcttgctgcaggcgagagggcgggcgggcgcggcgcgggccctccccctctgttgtcttccgccctcgcccgccttcccctccagcccttcctccttccttcctccaggccactctcaacccactttaccaggccgacactcgcttctctcttctttttcttctacgcccgcctgtgctccggctgctaccctcatccacaccaccctcccttgcccttccgcccatgtcgccctccgcctcgacccgccgggcccgcaagtcggccggcctcctcacgctcctcgccctctcggccacgaccgccgtctctgcctcggccagctcaaacggccacggcgctggtgctgccgggggtcttgaggcccacaagaagcggatggtcgtcatgccccgccaagagccggcgccgtcagccccggtcgcgtcgacgcctgctgcaacaccgacggtcgctcccactgtgcgtccctccttcgctcctttcgcgagaaggctctcttagtgctaaatgctgggcggcatggatgcgaggcgtcgtcaatcacacgcgctgtcttctgctcggttagatcggctgacagctccctttcggaccttcccccctcgcccgcccccctggacagcatcattttgtcatttgcgcttgatccaatgccggacaacatggcctttggtgagcagctaccttccagcagcgaattgctggatgaagtcgaccgtgaactggcggcaagtgaaacgcgattacgcgagatggaacgttatgtcacttccgatactttcacgttacgtagccgtttccgtcaactgtgaggaaagttatgaatactcgctggcaacaggccgggcaaaaggtaaagcctggtttcaaattagcaggcaagctggtacttcttaccgcactgcgctatggcccggcgggtgtggcgggctgggcgataaaatcagttgctcgccgaccgctgaaaatgttgctggctgtggcgctggaactgctgataagtcgggatgctaataaactggcacagcgttataaaaggtgaggggagtttcgcaaaaattgttaaatctcaggcgtataatggatggcaattttcatccatagaaggacgcttacatgtttaaaaaaggcttacttgctctggcactggtgttttcactgcccgttttcgccgctgaacactggatcgatgttcgtgttccagagcagtatcagcagtagtcgacgtatttcgggttcatcgtcttgacctcctcctttgtcggcgtcccgagcaccttgataatctcgacgagctggtcgacgccgctctcgccgaggaaaggcggctggccaagcatgagctcagcgaccgtgcacccggcggcccaaatgtcaatcgcgaccgtgtagtctgtcgcgccgaagatggcctcgggcgcgcggtagtagcgggaggcaatgtatgagacgttgggctggccgaccgtgatgaccttggccgagccaaagtcgatgagcttgagcatgccgctcgccgggtcgacaatgatgttttgcggcttgatgtcgcggtggcagatgccgagcgtgtggatgtaggcgagcgcccgcatcagctggtacatgtagaccttgacgtagaccatcggcatcgactgcttctgcttggcgtagaagcgcgtcgccgcatagagcgtctcgggcatgcactcgagcacgaggttcaggtagacctcgtccttgtcgcctttcgagtaaaagtaggcccggaggtcgacaacgttcgggtgctggaccgcccgcatgatctgcagctctcggttctgtcccgcttgcccgcccgcctcgcttgttcctccctccgaccgaccgaccatccaacctctccgatcgttccacccacccgccctcgcaaaacagcacctccgacgtcctcctcgtgctcgttgccatcctgtccgtccatacctactgaagtcttcacctgttgttggtcgaacgcgatgactgacggcttgcttctgccccacctcccgctcgctcgccgctcgctcgccctcgtccgcagcttccccccggccgctgtcgcgtttgccagtggttgcaactgtgatctgttcatcaacatcctgcttactctcctcggctacatccctggtgagactttcatctcttgcacggtccgttcgacgaacgatgaagctgattgtgacgctgtcccctcggccaggccacatccacgccttctggttcgtccctccctccccaatcttgctcctcggcgcacgtgctgatcgacacgctcgtttgcgccttacctgtctgatacaggctgatctacaagaagatgcaggccgaggagcgctacgggccgggagggttcgtctacgtcggcaacggcgggtacgaggtgcgtcacctcggctttcgacatgctcatctccgtgccgaccatcgcctggacgatgtccttccacatcaaaaatatcgaaccgacgctgagctgggccgacgtccactacaacttcgacctcgtcttcaagctcagccaggctgagacgtacagttaccgcagctaccgcagcgagtactacctcggaatctggagctactggctgccgctagtagcgtccttcgtctatttcttgtgcttcggcatgcatgacggcgtcctgtctcgtgccatctcggtctaccgcggcacgctttctctacactcaaagctacgcgggttcgtcaagttgcacgtcattgcctccttgcctttgcgaaccgttgacgcctttttctaccccttgcagacagccccggtctgaagctccgctcgatcccccgacactcgtcacgacggtcatttctccgtcggcgcaacactaggtcagccgcccggtgagaccatagcggctgctgccaggaatggcaactactgcgtcattgcttaattagggcagcgagtaagtccctgatccagtctgtcgagcaagcatcgagcgtatctcccgtctgacgccttcggggagaaatgttcggagatcacgtactggcaacagcgatcctggatcggctgctacatcactcaaccacgctgaatatcaaaggagagagttaccggttaaaagagaaacgtaaagctggagtgctgaccaaaaacacaacgccaatcagtgatgatgaaatggtggaaagcggacagcatcagtaacgaaagtatttagcgggcatgaaaatggcaaataacggtcaaacatcgtggcgttgacaatatggccatgaatggcgttggatgccgggcaacagcacgcattatgggcgttggcctcaacacgattttacgtcacttaaaaaactcaggccgcagtcggtaacctcgcgcatacagccgggcagtgacgtcatcgtctgcgcggaaatggacgaacagtggggctatgtcggggctaaatcgcgccagcgctggctgttttacgcgtatgacagtctccggaagacggttgttgcgcacgtattcggtgaacgcactatggcgacgctggggcgtcttatgagcctgctgtcaccctttgacgtggtgatatggatgacggatggctggccgctgtatgaatctgcttcggtcactcggcgacctcaagtctcagcatgcgttgctgctgcttcggttctgcatccagcaggatcttcggcacctccagcgcacgcttcgaacggacgatctgcccggtgtctgggacgacctcgatgcagccctcgtcgacgcagccctccttcttcggtcctcaccccgacgtctcgacaccgacgctgaccttgtcactctgcctgctcgtctcggtggcctaggggtcctctcgcacgccgagtgcgctccgctcgccttcgcatccggctcggaggcggccgaccgggcgctcgcttcagcccttcaactcgaggtcgacgacgacaaggccatcgtcacccagcgggcccggtgcgacaaggccttcaacactcggctcgaacgtgtcctccgtcggctccctggtctcgagcgcgataccgtcatcgagtccggcacggtcctcggtcgacgttggcttggtgtcgtccccttccggtcggtgctcgagctgtcggacgccgaggtcgcttctggtcttcacttccggacgctctgccccggctcgctcgacttctgcgccgactgtggcgacgccccccaccctctgcccggccatggagagcaagcgcgagtgagggtcggtacgtggaacgtaaggttcgacggcgaccgtgcaaggagcgtcccggttgggcagccaggggacgggagcgagcggcctgcgttcgatgggcaaggagccgatgggtatggcgagcgcgtacgtggttcccttgccttcttgctttccggtaggaagaggagcgccctgagggacagaggtgggagctgacttcgctcgctcgctcgtacgctcgctagtcatgggccgaacgccgctggcggatcttcgacacgctcgttcagagccgggtcgacgtcgtcgggtgcgttccttggccccctcctcctcccttccccattctcactcactcgcgctccgcgaacggctcccacgaggaggtagaggaaggtagatgagagtagctgacggcttgagcttgactccctggtggcccgctcaatgcgcgcagcttccaagagacgttcaagagccaggttcgtccggcccctttccttccccttcccttcttcgcccttccttctttcctcttccctccccctcatccgcaccgacaagcaaaggaagggcggccggctggcagggacggggggcctggtaggggggggggggctcggcttcccggcctcacgctctcgacagctcgcgccagcaagacctgaaatgagaccgggagggacgtaattgtcgcgtcaggcgtatctggaccatcttgatggcgatgctgcagacaggaaggtcggggggaggaggaggaggagcgtggcggcggcggcggcggcggccggagacgagtcagcgccagctatcccgtccccctgcccattccgccagctacacagtacagcacagacggaaccgcctctcttgccactcttgctgctctggggatcgttggtggtcgtcgacaggcagaaggtggagggggcgacaggtcgaggcaggcaggcgggcggccgcgggcgcgggcgcagcagcccggcgacctgcgccccgacacgttcgacccctccctccctgagctagccggccaccgtctgaccggatgaccaccactcttcttgatctgagatttcatcgtcgagagctatccaacggtaccggtctcgcgaggccccctatttattcaaccctcaagggtccgccttatgcacgcatgtggtcacgatgcacatacagcatacatgcttgtattagcagagacgcttgctgaaatgaaagatagttttacaggaaaagtcgttgtgatacatcaaccagctgaagaagtaccaccaggtggtgctaaagcaatgattgaaaatggtgtattagacggtgttgatcatgtattaggtgtacacgtcatgagcacaatgaaaacaggtaaagtgtattacagacctggttatgttcaaacaggacgcgcattcttcaaattgaaagttcaaggtaaaggtggtcatggttcatcaccacatatggccaatgatgccattgttgcaggtagctacttcgtcacagcgttacaaacagttgtatctagacgactaagtccatttgaaaccggtgttgtcacaatcggttcatttgacggtaaaggtcaattcaatgtcattaaagatgttgttgaaattgaaggtgatgtacgtggattaacagatgctacaaaagcaacaattgaaaaagaaattaaacgtttatcaaaaggattagaagcattgtatggtgtaacttgcacattagaatataaatacttcccgcccctccccccgccctcataccgcagtccatcccgcaacctcctctccctcccgcggccctcgcggacgacgccccactccgcgcccgagggttcgaaggagcggtacgacatgcccctgccccggagggtcgagaggaagtcaaagtagaggtcgagcaggccaaaggcgtcgcggaaagcgagcgagagcggcaggcgggccgtgtatgacagggccggatcgactgggcggggtgcggtgcagcggggcgaaaggggagcgcagcacaggagcaaaatcaaaggaaggagtgaagggggggtggagtcagtcgcgctcgtccgtccgcactcgcacagacgcccagcgaggaggaaggaagtcggcaaccgcgcaccgtagtctgacaggacgcaaaaagcgtacgtgtgcgcgacggcaaacgccggcatctcgcagctgatgaggatgttgttgagcgcgagcgaaatgtgctgtcacgacgatccaaggaagggggttgtcaggatgcgcgaccaggagagagagagagagggagagagagagggagagagagagggagagagagagggctgacgtcctaaccccagccaggaaaaaaatccgcgctttttctctttcgccatcgtgtaattgcgctcctgccacccagtgcggctgatcaataaccaatagaagtcaataaaacagcgagtttaacactttcccgccgccagcaacacgcgccgcgccgccatgaccacgggagacagcagacaattattcgtaaccaggtatgtcgcaccattacgtgggggtatcgctgaattcaataaaaatactgggttcgataaaaatgaagatgcagaccgccgccacgctgtctttatcagaccagaacggcggcggctttgaggacaggactcaaaaattaacgccgggagagagttacgaaacgaatttcaatagcattgtcgaaaaaataatcatcgccacgccgccgaatttcgtcgatagctgtgcaaaagcgattaatgacattctgtccgatgcagtaagaatcgctatatcgccggtgccgccaaaggcagcgtgacaggaggtgaccagcgctgattcaatcggatgcatattaaggaaacgcccgatatagaatccacatatcgtcattgccaccctggcccgaatcggaagatctgattgttgatgcgctgctcggtaccggtttgcggcaagcgccccgcgaatccattagccagttaatcgaccacgctaattcccatcctgcgccgattgtggcggttgatatcccttccggcctgctggctgaaactggcgctacgccaggcgcggtgatcaacgccgatcacaccatcacttttattgcgctgaaaccaggcttgctcactggaaaagcgcgggatgttaccggacaactgcattttgactcactggggctggatagttggctggcaggtcaggagacgaaaattcagcggttttcagcagaacaactttctcactggctaaaaccgcgtcgcccgacttcgcataaaggcgatcacgggcggctggtaattatcggtggcgatcacggcacggcgggggctattcgtatgacgggggaagcggcgctgcgtgctggtgctggtttagtccgagtactgacccgcagtgaaaacattgcgccgctgctgactgcacgaccggaattgatggtgcatgaactgacgatggactctcttaccgaaagcctggaatattgatagataagttaaaaattaagattccgttttgtcgagtcgatcacttgacgattttattcgtcttgaattgcaatgcgtttttatttttattcacaagctgtggatgaatcaggcgtcacgcggtaaccctttttcaatcacccgaaccagacgctgttttttcggcaattgcacttcgactatgcacgcatttcgtctctctatttgctgcgcaatcgcccacgctatgtgctcatcgagaagtgggtgctcacctttacgactttccagcgctgtcaaaatcgtttcatcccaaggggcattgcctaatgctacggcgatattacgcagccaacgcaggtgaccaatacgacgaatcgccgatccttccgtgacttttaaaaacttctcttcgctccaggcgaataactcaatgagttccggtgcgtgtagcggcttacgcgggctgaaatcctcttctgtggtgagttgtgaatagcgattccacgggcagataagctggcagtcatcgcaaccgtaaatacggtttcccattaacggtcgcaactcttccgggatcgccccttcaagttcgatggtgcagcggacgctcaagacggacgaccttcctggctgctgggacgatctcgacggcgctctcctcgactcggctcttctcatccggtcttcgcctcgacgcctcgcaacggacgccgacctcgttaccctgccggcccgactcggcggtctcggtgtcctctcgcacgcagagtgcgcgcctctagcgtacaaggccagctctgatgcagccgacgccgctctcgctccggtccttctgcttgacgtcgacgacgaccgacccctcgtcacccagcgcatgcgatgcgacaaggccttcaacgtccgactcgagcgcaccgtccgacggctgcccggcctagctcgtgacaccatctccgagtcggccaccgtcctcggtcgtcgctggctcggtgtcgtgccttttcgatccagtctcgagctgtctgacgctgacgtcgcctcgggccttcattaccgcacgctttgctctggcccactcgacttctgtgtcgactgtggcgaggcctctccgttcggccacgacgaggcttgcaccggccgcgctccggtcacgctcggtcgacacgaacaggtcaagcttcttcgtccctaggtcttcgtagtcgacgaccccgagacgaaaaacgcctttgtcctccccggcggcaaagtctttgtcttctcgggcatcctccccatctgcgcgaacgaggacggcctggcggctgtgctcgggcatggtaagtttgacgttgcaggcgctcgcgctggcatggtgtaggacccgtccaaactgacggggtgtctttgccctctgcgcatgggtcggcggtcgtagaggtcgctcatcaaggttcgcccccggccctcttttgacctccctcccactttctcgtcacctgacacgagcttccccactctccttccttttttccggccctcagtcgcccgccactccgccgaacgcatgtcgtccctcaaggtcctcagcgtcctctcgttcgcgctcgaggcggctgggctcgacatcggcctcagccggctgctgttgacttttctgctgtcgtgcgtcgtcctcctccttttgattctgatagggctcggccgggtgggtcgttagagtcgagaacaggtaaagctgactgagctcgtccggctttcctttccgcttatctcttctgagggaggggcatcttatctacaagtgcagccgggggttggcaggccagcagaggggggacgatgacaaaaggcgggcgagagggaagggacacccctcgcaagcggggagagagggcgaggaagagggagcgcacggtcggcgcaagaggcttagaagcggtagctgcgaggagagggaggggccagagggtcagcagagggagggacgaggagcaggagagagggcgcactgcttgtcgtccttcttgtcgtccctgcgagcgggcgggcgagcgatgggagaggggtcagtcagcgtagcgcagagcagagcagggagcggagggaccggcgcacttcttgtcgtcctccttcttgtagtcgtagccgtgctccctggagcgggcagagagaagagggcgcaagggtcaacgacgcgacagagggcagcagagagaggaagatatgagggcgcacttcttgtagtcgtagtcgtagccgtagtccctgcagcgaggaggagaggggttgaatcagcgtcggaggaaagcgagcagagagaaagacgggacccacttcttgtcgtccttcttgtcgtcggcccagtccctgactgttgcccaaaccgccaccgccttgcgcgccatcagcgccgccagcgctattgttgccaccgatcgcgtcgttgctgcgctccaatgggttgctgccatttccttgcgcgccgccgttacccagtagcgacgtcagaatgactgccagtgcttccagtaacttaccttcctgcgacgacttattgccggaaagcccgttactgcctagcccgttattgttggtgcggtccgcgccgccaacgccgcccagcccgccttgcagacccgcgctggggatactgagtgtgatgctgatatcagccataatatgcctctttagcccaaagatgagatgccgttcccgaaacaggcagacctctgcctgccaccagataagtgaaagaagcgcctgataagttccacgaagtggataacgatcaggcgcataggatggttaaaccgtggctttcccagtatcggcgccaacggcatccggtgcgggcgtcaggccgggctgattgccgcccgcgccaggttgccccttgccgtcagccagttcgccggcattattactggctcctgccgcggcggcgatcaatgcgcgcaagaagaagaagcgccgctcgaacgactcgagtagcgacgactcggacgacgacgacgagaaagagctccgcgtttacacctaccacggcaacaaccggagctccgactacgactacattggcgactttgacgtcgtcatcacgacttactcaaccctgacggccgagttctccaagcagaccaagacgggcgaggacgacggcggctcgaccgccccgtcggctgccgtctcgggcacgacgacgcctgcgcgcgatgacggcgacagcgacgtccaggagatggacgccgatggccagccgctctcccagaccgtcgcacgcgtcctcgccgaaaaatacggcatcgtcgtcctcccctcgtcgttctttgcgctctcccgcccaccctcggcttccgcctcttcctccgccgccggccccgacgacggacaagtgcggcaaggctcctcgtcggaggacgacgacgacgacgacgactgcctgaggtttgcagtcgcgaacgtcagcgaggccgagattgactcgcttggccctaggcttgcgcgcgtgtcagccgaggactttgactgagtgctggcttagggggtcgcaagggggatgggatgtctttatggttttggagagggtgtgagcagtgcggtggtcctatcggtcggttcgcaagtgccccctgccccttctcgagccctacttgtttcattcagcaagtcgtaaaccaaatcagcataaagaagaccgtcactccatgccctccctcttccaggcgccgctttaaagcagtccgatgcccccccccccccctccttcccccttcaagccgcacctccaccgcctgaacccaccgccgccgaccgccccccccccccccaccccccccgaacgcgttaagtcgaccgcctggggagtacggccgcaaggttaaaactcaaatgaattgacgggggcccgcacaagcggtggagcatgtggtttaattcgatgcaacgcgaagaaccttacctggtcttgacatccacggaagttttcagagatgagaatgtgccttcgggaaccgtgagacaggtgctgcatggctgtcgtcagctcgtgttgtgaaatgttgggttaagtcccgcaacgagcgcaacccttagcctttgttgccagcggtccggccgggaactcaaaggagactgccagtgataaactggaggaaggtggggatgacgtcaagtcatcatggcccttacgagtagggctacacacgtgctacaatggcgcatacaaagagaagcgacctcgcgagagcaagcggacctcataaagtgcgtcgtagtccggattggagtctgcaactcgactccatgaagtcggaatcgctagtaatcgtggatcagaatgccacggtgaatacgttcccgggccttgtacacaccgcccgtcacaccatgggagtgggttgcaaaagaagtccactggctttcgccgctcgccatcgccgtgcgaccatcaagcgatgcgccaagttttaactgaatataaggaaagccggtgcgcatccgcttgagaaagcctttattcaattgctcggcttcactcatcatcaggccgtggctgacgtcaatgccagcctgttgcagacggtaaagtccacgcccagcgacctgcgggttaggatcttgcatcgaggcaaccacgcgcgctacgccagcggcgatgagtgcgtcacagcacggtggcgtacgaccatgatggctacagggttcgagtgtgacataggcggtcgcacctttggctttttcacccgccatacgcaacgcgtgtacttcggcatgtggttcacccgcacgttggtggtaaccttcaccgacaatttcgccatctttgacaatgacgcacccgacattcgggttgggatgcgtggtaaaacgtcctcgttgcgccagctttagcgcccgcgccatgtaatactcgtcctgcacggcttagtcctccaggcgcgcgatctcttcgccaaattctttgatatcttcgaaactgcggtagctcgaccgcccagttcctccgggtctgctggctcttggccgccggcaccctttccagcgctggatgggtcgaggggaggtcaccacgacgagtgggagtgttgaaggaagagcgtcgtggtagttttgcgggagggtcgccagcgccggcgcgctgcagcgcccgcccgcgcggcggcgccggaagttagggttacgcttcatcgaacgtaacacgctttacctccctccgtaacatcactctcttgcccttacggcttcctccctcatagcaattttcaaggcgcaagtcctcatgtatcttaagcgttcacccgactgccttgtcccctgcaaggccgtgtcgttcaacactaccaccgaaacggggcggacgggctagcgctggtgggggtgtatgtggacgacctcacgctcgccttctcgaacctcgccgccctgcagcgcttcaaagcccagctctcggcggtctacaagatgacggacctcggcgagctcacgcacatgatcggcttgaaggtcgagcgagaccgggcccggcgtcggatcgaggtcggccaggagcacaagtcacccgggaccgggcgaccggcacggtcagcatcacacagacggcctacattgacgaggtcctcgaccggtttgactcgaccgacatcgctccgcgccgcacgccgatgaactcgaccctccagctctgggatgccgattgcccgtcgaccccggacgtcagcctccgcctgcggtatcaggagttagtcggctgcctcaattacctcgtcacctgcacgcgctacgacctggcgtacgcagtgggagtgctgtcgcgcttttgcaacaaccccggcaccgctcactgggaggccgccctccgcatcctcgcttacctcgcctgcacgagggccttcgccctcacactcggtggccagactgaccggcccgcgctcgagctcttcaccgactcggaccacgccggtgacaaggacagccgcaagtcagtcacaggcgtcctggtctttgccttcggctcgctcgtctactggaagagcaagaggatcaacgccatcaccaagtcctcttgggagtccgagtacgttgccctctccaagggcgcgtcgcaggtcatctggctgcgggcctctgcttttctggcctttgctgagtttactctcgctctgggctgtcgggtcggacgatgggacggtgttcgccagctggcccgcagccgagggcgaccttgctcgctgccgccaccgccgcccgccggccccgacgacgacggcagacgggtcgctcgagcatgagacgctggagactgggcgggcgaaggcctggctgcaagccgtcgggctgggtgcgatggggctggctggcgtcgtcttgcgaggttggtgggctagttcggccggcggcgggagacgggagcagccttgcctcctccagctcgaccaccagcaacacccaacctcctccagcaagcaagcagagagagagagacacacacaagacagagacaggccagaccttccgctcgctcgtcacctccgcccgctcgctccgacgcgcacgaccggcccccgcaagagtcaacatctcagccgccctcccaccgactcgagcccgccgccgccgcccccccttggccaacagcgacgccaactcacatcgtcctcggacccctccctccctctttcttccatcttcccccctctacaggcattaatcctcccgcctcatgcaccactgatcgcaattcttcaccagttagcatctccttttgcatgcgttttaccgatatgttaaataatcttaggataccattggtaatcaaactgattaagtggaccaaaggagaaaaaatccattgtaaaatgctcaacggcaatgaggatgcaaaagcaacttgctgagggtaaatagcagccagagttttcggagtcatttctgcaaaaaccaggatcagtatagtcaacaaagcagttgctatagccacccctgcatccccataaaaccgctgtccgattaaagtggcgagagtcgatgccactatatttgccaaagtattcccaattaaaaccacacttagtagtttatcaggccgagccagcatggaattaacccgcatggcttgcttatcattgctttttaccaggtgtcgtaatttatatctattgatagacatcatgccaatttcggaacctgaaaaaaaagcggacaggcaaattaggaaaaacaataaaaccaacaaagtagaaagaggaagttgcactgaatgagaaagggaggggtccagcggagggagtcgaggagaggaggtcgtacgtctcagtgttgcgggcctgggcgtcaacaggttgagcaggatgtcagcgcgctgcgcccgcttgcgagacggacgaccaataggcgggagagagacgcaccgccacgagccccaccgtccggctgaaccgcctaaagcccgtctcaaagtaccccctcgcccgccagacatacgccctcctcacctcgagcgcaaccggttgggcgtgcgcgaggaggaggaggtagagcggcctgtgccggaggatggacgaggtctggaggatcgggacgttggttgtgatgctggctgtgaggggccggagaagggcaaggaggtggagtcggatcttagcggtcgcctgcgatgcggagtgggggagggggagtcgtcaggctctctctttcttcttcgttggctagcctgcccgaagaaagcccgtaggaggcaactaaccgtatgcttcaggccctccacgaccttctcgacctcccccacagccctcaccctcccccttcttctttcaatctcgcagagttcgtcccagacaccgggcagatcgtccgttcgaagcgtgcgctggaggtgccgaagatcctgctggatgcagaaccgaagcagcagcaacgcatgctgagacttgaggtcgccgagtgaccgaagcagcccgacttgatgatcgaccttggcctggaggaaggaccgcctgaatgctggactgccgacggccgtaccgagcagctcgagccctgagcttcggatgtcggccagcgagtgtgacttggacttggcgacattgagctgtagggacgagccgcgaccgtcgaagaagtcctgaacctcagccaaggcctggtcgtccggcgagagaacgtagatgtcgtccaagtaggccagtagcagtcggtcagggccgaggtgtcgaacgaggtcgtccagagtccggcgaatggcgaccgagaagaagagcgggccgaacgggtcgccttgtcggaccccttgcgatgactcgagcacgtcgaccgccccaccggcaccggtgaccgcgagctgagcgggcgagccgtagatccagcgaccggcacggtagagagccggagcaatctttctacacgaaaattagaaaatgatagcgaaactgtcacttggctaaacacctttttacaacaattttggtatatttttgaaccttctttaagtgagagaataacggaaattacggatcagattctttcagaaaatgtccccagctttgttgactcaatggctctctccgaatttactctgggaaccaaatcaccgagaatgggatttatccgtagttaccctaaaacagaggaagacactgttatgatggatttgagattagcatttagtccaaatgatattagtgacttaacgggtcgtgagattgctgcttgcatcaaacctaagattgctcttgatttgaaaataggaaaaagtattgcttcagctaaaatgcctgttttaattgaggacctttccttcactggtaaccttcgtgttaaaataaagcttattgataaatacccgtatgccaagactgtcggtttgacttttaccgagaaacctgttttctcttacattcttaaacctctcggaggtgataagtttggttttgatattggcaacattccgggcctttgcgcggggtcatgggggcgagcggcgcggtcgtggttgaccaagggatgggctcggtcgaagtagaggcggaggccgacgtcgaggtcgaggccgtcgaagggccgtcggccacgaaggtgttctgaggagcggcgatgacggccggctcgacgacggtctcgacgctaacgagcatggcctcgacgacgacagtctctgcggcttcggcgaccggcgcggtctcggcgatgacagtctcggtagggatggcggccggggcagtcttctcgtcgtcgctggccttgacgtccgagtcgacactcatgtcggaaccggcgaccgaggccggcttcttgaccgaggcattcttgaagatgccagtctcgacaaccatgttggacatgaagacgtcgttggcggccgagaactcctcctcaacggtcccgacagcttcaacgacgacagcagcctcaactacgacggcggccgcctctacaactgcggctccgacggcgaccggcttctcgcggacgacatcgctgacctgctgctgaagcgcgacgacaatagccttgaccggtgccgtgtcatcaccggcaatacgtatctggtaccagccttcgttcatctgacggcgaaagcccggcatctgcatcgacagggcgcgaatggcttccgctgccgtgttcacatacaggctgaggcggcggccaaatcgttgcaaatccccgtgaaggcagatgcgtgccagtggcggtgacgccagacagaatgcgttcgtcgttgccatttttcggaatacctctcccgtttactcagttgttcaggcagatggtgaagcagctcaccgttgccgcagtaaatggcggcatggttcggtaccgaagcaccaaagcagcacagcagaatatcgcccgcctgtgcagaggacaggggcacccggtaaaagccggtgaccgccatattgtccaggtaaaggttctgaccgttgcgccaccagtcatcctcgcgatgaaaatccggcatttcagtccccgccagatgataagcatcccggaacagcgtgtaacagtccgtcaccccgtgctcaaagcgccgtcccgtcagatgtggcacacagcggaatttgtgaagcattgagtcgatcagctaatttggagcagaagccctcaatttcattgcgttcctgatcagtagttttgttggtaataccacatggtacaacaacactttgaacaagggcaatagcgggaggcaatttcaaacctttgtcatcgccgtgaaccataacagcgacaccaatggttcgagtcgaaagaccccaagagttttgccaaacaaatagcttgggacgttcaccagttggaccaatttctgcgttaggatcttcaactacgatattgaacatctttgagaagttttggcccaagcaatgactagtagctccttgaataccacggccagtagtaggaatatatccttcgacagtcgttgtaaacatgccaccagcaaacttctcgttttcactcttgacacctttgataacaggaacagctaaaagattggtataaatacgggcatacaaatccaatatttgatggacttcttcagttgcaccttccaaagtcatgtgagcagtatggccctcctgccaaagaaactcacgagttcttaagaagggttgagggcactccactgagcgtcaaggcactcgactcgacccaggccgcgacattctatgggcgcaactggcgcgtcatcccttccgaattcggtcctccgacggacggtctaggcctcaagtcgaatatgcgcttgctcaagcgctttgccattccgacgtacatgtgaaccggcatcacgtttgacaaaccacaacgacacatcaatgacttttggttgctgttcatgcacgccactcatggggagcacattatttatccgaaagaaacccgacacctccacctctgatttcggcccaggtggcgcccgcctacaccccgggccccgggctggtcgacatcagcgccgaaggcatcgcgccgagtgcggtcgaagtaagagcctttggcgtctcaaagcgcgaccctttggacttggcatcgcccatcatccacgcccgtcctctgaggtcgttgacagtcgtactgtcggagcctgacaatgcaccgaccgcccacgcccttgcagacctccgtcgtcaacccatggacgcgggaccggccaggcgtggccgacctcaaaccctcccaagcgcccccctcagaaccgccgacgaaaacggccgtcctccgcctctgctccctcacgaccgagccgctcaaggactggctcgcagaccacctcggcccaggcccgggcgggatgggagacttggtcggaagggagatgtgggaacgggcactggcctgagattgagagccgggacggtgcgcgcgcgaaagcggacaagttcaacgtctgtcccgagcccttcggaaagtatgtgtgtgtttgcggcttgctgacggacccccttcttgcctcttctttcaacagcaggagccttctcgttctcggcttcaatcaagacgttccgccaacaaccgactgcccccctcctgtctgcttgagtattggcccgcgaacgcccttcgtcaccgccggtcggttggtcgaccccttcttacgcccgcccgccgcccatacgcaccgattctcgtccgcaactgcacgacgacagctcaagtggaccgcttcgcacgcacgcacgcatctccagcttgactctgcacatcattaacccggcaacgacggccagggcagcaacggcggcggcggtaacgggaagggcgactttaacccgaaagagaagtggggtcttttaccccgtgacacgcgcgaggcccgccagccgacgtacgtcaacggccgacacgtcatccgcgacccttccgcgtcggccggcttcgaattcgttggcgagaagctcggccgggggaaggaggagaagctgaagcggaagagggaagagagggaggcggatgagaagatacaggcgctgttgggggttgatgggggcagtacgcaaggggggaaaatgttggaattggcgaggaggaagcagagggcggaggagagggagcgcgagaaggagcgcggcggaggtggggcgggtttgagcagcaagcgccggtcgatggcagtcgacgacgacgaagacgacgacgatgcggccgagccggccaaagtccggaaacggagcgcgttcaggccagagccatcaaggcgatcggctttgacccgtcgatgctcgcgacgggtcaaagccgatcgccttgatgtgctctggccctttccgcccggctccgacgtgtcgacccttcgcggccgctcacagagggccctctccggccgcccggtcgacgggcctcaagcagccatttcgtcgactgagcaagcgacgtgggaccctgacttcggctttcttcaagatctccatctggacaaagaccctaccatccctcgccccggccccggccgctttttccataactttcgatccacccaaaggcccaactcggctcgccgcacgcaaacgcgcttcctagagtatcggaccccttactcacggggctcaagtcgacgacagctgcactcgattcggcaagcatggacgttggcgctgcccgcggcgcacgtccctcttcgcccccgatcccagtgctcccttctctcacccgcccgcaccactccttttcgctttgccctcgacgtcttcagcctctcggccttgtaacccctcctttggacccttccacctccttgtacgacctcgcaccccgccttgcacttactccccttaattccgcccctgtcgcaagcctcatttctgtaaaccccttaagatattctcttaactgaccagtgtcggtttagggtacaattaaaataacggataattttcctgaataaaaatttctattcaataaaacttttattttaagatccgttaagatttactcatcactatttattagcttagagattgttactttatttgacttaagctaagctttttaagtcaaaacccttcagttttcggtgaaaaggaatttgacatttttttacgttacttatgtcagcattctcgcatctaataaatccaataaacttaaaagttcgtcttcatctttatatagatcggtccactacccagtatttttaaaatactgccaaagtttaagtattaagtttaagatccgttaaatttttgatgcctttctccagaaaattttctttttttggataagtgaactattacgtactccttagataatggctgtttccaagcccatattcttattgaataaggagtaagactatctttaaatcacttaacttaaattggggaactttaaatctttgatctgagctgtttctcttttccacggcgcctgactggtgaacaccagcgacagcagcgcatcggcggtcgggcgcaccgaccagttggaggagacgaacggttttttcatccacacattgtcccagaatgcgtcgtccggcacgcgctccacattcagcggaataccggccttctgcgcagacgcctgatacagctgaccggcgtccaccgcgccggggaaaccggcatcggcgaccgacagcgtcagcgggccgctgaaaccggctttctgccagtgccatttggctttctccgggtcgtacggacgctggggaatgtctttggcgaagtagcggttggacgggaaaatcgggttgtcgttggccacgctggcatagccgcccagcacggtgtcgatgatctgctggcgatcgatggcgtatttgagcgccagccggccgtcctcgctgttgaacggcgccacgttgccgagaccggggaaagtgaaaatctggctgtcgcgcgagcgcagcagttgcaggctcggcatgttctgaatgcggccgacgatgcgcgggttccctcccttcctctcgctcgaaccggcccaccagggcaaagcctacaacggcgcgtcgtccgacatctggtcctgcggcgtcatcctctacgccctcctcgccggccggctgccgttcgacgacgacaacatccgcgtcctgcttcagaaggtcaaggtcggccggttcgagatgccggccgagattaaagggccggcgagggatttgctctttcggatgctcgacaaggacccggtcaagcggatcaaggtgcgcgagaggccctctcgctctcagccagtcgagtggcgttccatccttgctgacccccctcgcctcacgcgccgccacagatggaggagatcatccgccacccgttcttcacgctctacccgcgccggccgatcccaggccgcgcccacgtcgtcccgccctcggccggggcggtcgagcggccggtcgacaccgaggacgagattgacgccgacatcctcggcaacctccggacgctctttcacggcgagaaggaggaggtcatcatccaaggcttgctgtcgaacccgtcagcgaaggcgtcaacgagcttggccagaagacggcccttcccaacggccggtcggcgacccctgtccagccctcgtcgtcacctgcgccttcgccggcacctgcatcttcgccttctcctgcgcccgcgccgcaggccgagcaggcttcaagcctggctgctccgtccgctccctcctcggagccgccaagcagcttccgagccccgatgcccgcacgcatcccctcggctgggtccctcggggcccgctcgaccaacggcaggtcgcccgtgttagaggcctcaggggacggacgagcatgccgacgaacgagcagagcgcgcatgcgagcacccggcgccggtactggatccggcccttgaggaggtacggccaagcaaccttggccatctgcgaacagggggaagggggaggcatgagcaagggagcaggcgaaagcgcgcgatcgtcgacccggctgcttgatgaagacccaactgcgccgcccggctcgcacggagacgcagtcaaagcagagcgacgaggttgcggcggatgagcccgagccggaaaggggcggacgtacaagactcggcgcaatattgaagaacaagacgacgccctgcagcccccggccagcatcactcactcatgtcagccctccggcattcgcagctcggctcggctcagtggtcgggcagagcgcgaacacgcgctcgccacggagcgggacggacctttggcgtcgagctcgagacgaggtcgagcgctgcgctcaggataatcacctttctcagcgcgggataggggaagggtaagggcgatcagagtggtggattagcccggcaggtgggcgctggctcctgagcgccataaacagggctttacctgtcagctcttttgtcatgcgctctcccatggcgtagccgacaatttcgcacgtataaacatctttgatgccagcgaggtacaaccatccctcctgtgtggcaacatacgtcaggtccgccacccagacctgatttggtgctgtaggagcgaacgtctggttcagcagatttggcgcaactggcagattgtggttcgagttcgtagtcgctctgaacttgcgtttctgcttacagcgtagccttagctccttacgaagacgtgccagtcggtcacgaccaacgatgatgccattctctgccagctccgtctggagccgccgggttccatatgtttcgcgagtgcggatatgtgccaccttaatctccagttttagccgctcatcactttgttttctgtctgagggttcatgctgtacccagttgtaataaccgctcctggatacaccaaatacctgacactcaaactcacaacgcttcggctgctgctcgccgaggcggcctcccgcgactgggaggtccaccagatggacgtcgagacggcctacttgtacggcgagctgcaggaggaggtctatatgcgtcagccgccgggcttcgaggaaccggataaagaggactgggtctgccgcctgcacaagggcctctacggcttgaagcaggcggccaggcagtggtgcctgaagctgcacgaggcacccacctcgactggcttcgagcggtcgacggcggatcagggcctctactcgctgcggtgggaggaggaggagctgcacctcgccgtctacgtcgacgacttcggcctcttcgcgtcgggcgtcaagatcctgagcgaggtcaaggcgcggattgcatcagcatttgttgaacgacacggccttgcaggggacaaggcagtcgggtgaacgcttaagatacatgaggacttgcgccttgaaaattgctatgagggaggaagccgtaagggcaagagagtgatgttacggaagctacggcctgctatcgccgctcatcacgcctgaggcgtgcccaacgatggcctgcggaccggggttcgtcccgctccctccctccctctcgtcctcctccacgcggctcctctctagctggcctcgctaccttctgtttcccttccgtctcgcttgactccgtccctatcgcgggctccctcagctcacacgactgcctgcctttcccccctccccaacaggatcgacttcacctggaccgaccaccaaggcaaggttgttaagctcccagcgccagcctacatcgactacgtcttttcgtgggtccagggcctgctcgacgacgagaatacgttcccgacaaagacgggtgagttggagctttcttgctgggctgggtgatggaggaagtgggtgcggttggaggtatggggggtcgagtgaagtggcgtaggacgagacgaggcaggctagactcagctccgtccggcatccaaccttgccggtcttcgccgccctctcacttgctcgccacccccccgccccgtggtaacgtacacgcctacaacaacctgtacaccaacatcaccagctctggtctgaacgtgcgccagaacggtcaggcgctgatcgaaagcaactggttcgaaaacgcgctgaacccggtgacgtcccgttacgacggcagcaatttcggtacctgggtgctgaaaaacaacaacatcaccaaaccggctgatttcgccacctacaacatcacctggacggcggataccaaagcttataaaaacgcagacagctggacctccaccggcacctacccgactgtgacctacagctacagcccggtcagcgcgcagtgcgtgaaggacaaactggctagctacgccggcgtgggtaaaaacctggccgagctgaccagctctgcctgtaaataatcggttcacatcagccacgctgatgccagaacccctcatccgcccggcaagcctgggcggattgcggaaccactatattgcggacccactatagagcgggggagcgacattcgctcgcccgcttttttatatgcgttaacccatgccattgaagcatacagcgccctgaacgctacaccgtttaccgacagtctggcgattggtgccattgcgatgattggcaaatcgctgccgaaagcggtgggctacggtcacgaccttgccgcgcgcgagagcatgttgctggcttcatgtatggcgggaatggcgttttccagtgcgggtcttgggttgtgccacgcgatggcgcatcagccgggcgcggcgctgcatattccgcacggtctcgcgaacgccatgttgctgccaacggtgatggaatttaaccggatggtttgtcgtgaacgctttagtcagattggtcgggcactgcgaactaaaaaatccgacgatcgtgacgctattaacgcggtaagtgagctgattgcggaagttgggattggtaaacgactgggcgatgttggtgcgacatctgcgcattacggcgcatgggcgcaggccgcgctggaagatatttgtctgcgcagtaacccgcgtaccgccagcctggagccctaccgccataatggtgacattgccatgcaatataccgacattccatgcagcataagcaaatcctaaggtaaatgccgcagagatgagtttaatcatgacgggcgtgctaaatatcatttctggttgtggcgtaagaaaatagtaaacccacagacttgctcccgttagcaggacaaaaacggtaattccattaaatccgcgtgcgtatttattcgttactgtgcaataggctgcccagataaacgcaccaatgaacgccaggaaataactcaatgggctggtggtgatattattgatgatttcatcataatgtaacccattgtcaccgcctaacacccaacagacgccgacgagggctaataataatccaggtacaatcaaccagttggttttctgaccattaaacagaatggcaaagagaattgtcaggctgggccacagatagttcaccatacccacttcaatcgcctgatgatgggtcgccgcataccctaaggaaagcgccagacagatttcatggagagaagtttgtcgatctggactcggacgacgagtgagggaccgtgtgacgactcccctctctccctctctttgccgtctggagactgacagggctcgtcagtgagcctttcgcccgcttgcgagctcttctcacacaggcgcctctctcctgcccccctcgcctacacccgctcgcttggtctgatgcgatgggccatcttcgttaaaggcttcatgaggacggaccaaggggcagagagaggggcagagagatgtcgagcgaatgtgggcccgacaaaaggcgggggggcagggggaggtaacgacggaggaggggcggcgaggagggtcgtctagatcgttcgtcggtcggtcatgacgcggacgatggagcctacgccggcgagctcggtcaccttttgagagggtgcgtgcgaagcaaggaggagggggcaggcgacggaaatgaggaaggaggagggagtcagcatctgcgggcgttggcggaaagtgggcaaacggggaatgggaaggagtcccccgctcgcccacgcccactccttccagctcgcaggccagcccatcccgccctccgcgccgccagccgtcgcgtacgggagcgcagagggcgcgccgtactatacggaccaaaggagcgggagtcccggaggcgcgttcggagctttttatccggcgccggcggcaggggcggcggggaggggtctctaggaaggtctaggtctgacttgacgggttggacacaggcgaatgccgctgaggcaacctcaaggacggcccgcttgctttcggatctcgtctagcgggctcgctcgccccacccggtgtcggccctggcaggtcagacggaagaagtggtcaaacggaccaacggttgacccatcaactcaactcgcctcaactcgtccgcgcgcccgcccgcccgctcttttggtccttcaagcccgaatttgcccgccgatacgcctcccctcccttcactcgcctgcccatccaggacgtgcagcatcgagcgcactcgtcatcgtcatcgtggcccagtaccgccggggctgccgacgccgaactgccaagggaggagctgtgagggcgccgagaagtgccggacaagcgacttggagacaagccggtagaggagctcgccgacggcgataggccggatgccgccgtccgacttgagcagaggcgtaagccgggacgtgcagaggagctgctggccgggtgccgtgccttgtgcgacgtgccgtgtgagaaggagcacgaaggcggcgacgtccgggtcggcgaacgcatggccgagcaggggcggggtctatcccgagacacccggggccgtgttttagggtgtaacgggcatgcaatgacgaaggcgggtctatggacgggaagcgaggggttcgagagctagacgaggggaagagacggaggcggaggaagggagcgcaacttagaaggcgaaaaagcgagcacgcgcccggagaagtgagagggagaggaggcgggagaagagaccgtacgacggcatgagggcgcgccagtggtcgaagagggggacagcgagcggccccggccccccccccctcttgcacagccgcgcgcgcccttcagtaaggcttgaagtggctctggccgcgcgtgttgctccgtgccggcccaggcccttgttgctgccctcctccttgctgctgctgctgctgctgctgctggccgccaccgccggcgccggcggtcgcggtgtttggcgagcgcgagcccgtctggcgcatgggcgtcgctgcgatgctgactgcgttggggctgccggtcccgctcgggttgggcgaggcgccattgacgttgggcatgccggtcggcatcggctgctgattgggcatcatgaagggcatgccgctgcggacgaggaaaggacgaggtcagtgagagggatcgaagagagaggagaggaggagggagcgaagacaacgactgaccccatgcccatcatgccgcccatcatccccggcatgccgcccatcatcggcggccgcatcatccccccgcccccggcgccgcccatcatgcccctgcctgtctcgagtcaggtgtctcttgacagggtgacaactttcagctctgaccggtcgactcttgtcaagagctgaaggttttgggcatgtgcatataatttgccttgcctgcgaagctggaagacaaagccgcttgagatgttgctgtaataacgctgcgacttatacgttaaaatcttatagattgtcatcaattccttaattgtctaacggctatgatattcgcctctcacgcgaagggcccgggttcgactcccggttagggattcacttttgccacatcgctatcacagcacctctgcggcacggtgcgcatgacgcttggtaattcagcagccccggcaattcagaagaccaatctcaacgcaaaagacacgatgggtaatcagtcatgcgttcacttgtggcattagaggggggtgcgctcgtacatgatcaagctagagtaagtcatagtcgataatctcccgtgaagtggaaagagaagaagctgttcagtacatgatgaacttgagaggtggaggattcttcgggttacccttacgcaccaggaagcccatggtggagtagaacggcgagctattattcggcaggcgcgactgccagtcggccgggatcagcttgcctttatcgtgcgggatttgtacgtcggtcacctggttataagtgacaacgtcggcttttaagccttgtaaactcgccagcgcctgttttgatgccccggcatgatattgttttatcgtcagtttgtcgccgccgttatcttttgcccattgttgctcaaacggcggattcagggcggcaaacagctcgcgggagacgtcataagaactgttcagcagttccgttgcctgtacatggcccgccagcagcagagaagcgaccaggccgactcagttctttttcagcaagttaacgggcattacgcacccttataaatttaatcactttcgaatagccatcatatttataacggacgtgaaaggagtaacggttttatataccgtttggtgatttggaagttgaaaagggaataaggtgagggagggttcgggcccgagcgacggcgggggcgtgggaacctgacaaaggcgtggggacctacctgacaagtgaggggcaggtgaccttcttgcttgcttgcccttccccttcttccaccctctcttcgaccacaagtcagcagcatgtccctcctcatggtctaccgccgcgcatcccacaagcttctcaccctcgcgtcgaccggccaggtgcgtgcccagaaggaaggagatccatgctgcctctcgctgccggaggaacggtccgcagcagcccattgctgctcggcttggtccatctcctgactggctcgcgccggctgacgtctcgctgttcctcttggtttcccgtaaacgtcatttcttcgattgctcgtattgtgtcgcatggctcgccgctcgtctcccgtcgcccgtcccgtccttcgcatgccaatcgccaacgtctcgccctcctctcttcgcccaacactcgaccgtgctctccctctctcgtccgtcgtccgcgaccgaatcgcttcgttcctggtcagcatcggcctcgtccctattgagtcggacaagtgtgtcttcctcggccagcggcacggccagaaagtcctcctcatgctgtacgttgacgactttgttgtcgctggctcggccgagggcgttgccgacgtctttgcggccatcgggcgcgagtttgaggttgacgaccgaggctcgctcgaccctggtgagctgctcggcatggagttcactcgggaccgggcgaccggcacggtcagcatcacacagacggcctacattgacgaggtcctcgaccggttcgactcgaccgacatcgctccgcgccgcacgccgataaactcgaccctccagctctgggatgccgattgcccgtcgaccccggacgtcagcctccgcctgcggtatcaggagttagtcggctgcctcaattacctcgtcacctgcacgcgctacgacctggcgtacgcagtgggagtgctgtcgcgcttttgcaacaaccccggcacgaaatcagccgtcgccgcgggggctgaacgtgtcgccgggcgtggctttgcgccagcctcaaaagcgggtgccggatggttgaccacattgagctgaccgatcggtgaatccggagtggaaaccatcgcttcaagcgtggcgagatagccggcagccatacgctcggccgtttcacggcgaaacaggtcgacggcatattccagaatgccatccatccccagcggttcaccttcatcgctatatttttcgtacagcatgaaatagagatcccacttggcgttaccgctgtggactgggtatacctgcgccgcgaggccggggatatcaaaggtttccgatggcgcgttttgcaggatcatcatggtctggaacagcggataatgcgacggcgagcgcaccggcaataactcgccgaccagcttcaggtaaggaatatcctgatgaccatacgagcttaacgcctgtgtgcgtacccgttcgagcacctcattaacacggggatccccggagctccgacatcgtcttgctgacgatccggcgccgttcgcgctcgatgatgcccttcatcacctgctcgcacgccacgcaatcaagggggagggggagggtcagcaaagccacgtcggatgcgcaagagagagggaaggggaaggggaaggaaaggacgtacctcggcggtgccggtccggcgggcgctcttcttcgaccggttgtcctgcagacggtccgtctcatctgtcgacgcaggtccaaacccaaagagagagggcacttgaagcgttagcgaccagcctcctttcttctttcctgagcgctctcgactcgcgcgggccaaaagagcgggagtgagagaagtggggggaagacggatgacgacgcaccgacaatctcctcgccgataatctcctcgatgatgtcctcgagcgagatgacgccgagcgctcccccttcgagcccgggtgtctcggagaggaggagcaggtgggcccggcccgtctggaagtagtcgagcgcttggaagaagacggcatacgagatgtaatacagcatggcactggacgtgctgcgcgagtgttaaatcgtcaagacatcgctggtaaaacaggaactactaatgatcaagtagatgcctggtttgccggctttaatcctaatttggtagtaacaacctggattggttttgataatcccaaatcattacatgaatatgctgcaaatcttgctcttccgctatggatcgattttatgaaagtagcattaaaagacaaacctgaggttgagttaaagcaacctgaaaatgttattgctgttcgaatagaccctgttagtggcttgctcgccaagcctaaccaggaaaatggcattattgagtattttcgacaaaatgaagttccatcagaagaggatcaaggtcctgtctataatgcacataatgatcaacaggaagaagaactagcgccagtggaagaaagtctgttttaatttgaaatattctgatgaaaccaaaaacccgtattcagcttgtaatacggctctgaggctctcaaatcgagataatcagccagttcatcgagggcgtaggcttcctcgcgccactccatcacctgccattccaggtggaacggatttttgcaaatcagtccgctgtagttcacatctgcgtcaagtttctcacacagcgcacgttcaattgcagcggcgtatttcagcgccttaaccgacgcatcaggcgcggttctcacggcaagattgagcgcgtagagcaggtgagcgtgcccgttctcgggattttttacggtgatgttcggcgcgggggcgttccggtcgctccagtcaatcgcagctcctacgcggtcaacgtcaaaaaccagccagaactgcgcatgaggctgattttgctggatgtagcgagcaagcagcgcacgccgtttgccggagatacgaagaccgaaagcgagctcatccgtgtgatagggacggtgaggtaaattttcttcgaagtattgaagcgcggcgctcatgtgttacgattccttccaggtaaacccacggccgatattaccggccccaaaatgtaatgctttcatcatgcgtaaccttactactgagatttaacaatccgggaaagaaagcgccgcccgaaggcggcacttttttatctgtcaggcaggcgacttgccggaaagcaggtcaaggacatcctgcacattttccgtattagccagccgttctattatcgagtcgtcatccagcgcgctggtgaggttagtgatgacctgcacgtgttcattgttgcgggccgcgataccgatcaccagacgagccacgtcatcctcatcgtcgccgaagcgcaccccttgcggatactggcagaacaccacgccggttttcagcacccggtccttggctgcaatcgtcccgtgcggcacggcgatcgactcgcccaggtaggtggaagtcagtttctcacgctccagcatcgcttcgacatacgctggttctacataaccgccttttaccagttgttcaccggcaaaacggatggcctgttcgcggatgcgtcgtcgtgtcggcccgcccgcagagtacggtcgggggaaggggacgacaaaacgccaaagagggctcaagagggcaagcaaaaggaaagaagggcgagagcggccaattgggggaaaacgtaccgcccatatgtcccgcgctcggcggcatcgaaccgagcgccggatggaccatcgttcgctgcgagctcgtctcatccgactcgtagatcccgggccctgcggcggttgaggggtaaaagttgcctgcgccgcctgctcgaccgaagagagggaggtcgggtcggggtcagcgccgagccgagaccgcgccaacctaccccgagccaaaagaaagcaagttgaggcgaagagaggaaagaagaagaacgcaccaaccccggtcgacacgcctccccgctgcgagtcatagacggcccgcacgcgctgctcgtcctcctcgtcgagcgcgcgcaggcaacttttacccctcaaccgccgcagggcccgggatctacgcctgtgatctgctgggcagccagccaactgcccagcttcttgatttgcgcattttccttccattcaataacctgtctggcgcgtcccgatccagtccccggcagctgctgccagaactgctccgtgctaaataaaagttgcgaccaggaccgttcatcactggcattaagcgccgcccgggttagcggtattcccattgccatcacccagcgagtaaaaggctgcttacgagccagattaaactgatgccatagctgcgcacttttacttttcgcgatccccggcgtgttctgtaattgctctggcgttaataaaagccaggaaaagatatgttcaaagcgatgagtctgatgcagcgcgcgccaaccggcctcaccaatgccatccagcccaagaacctgttttgcccccagccagactaagcgtgaaatgaactgttcctgacaaacatcagaagcaaagtagcaggtcaacgagttaaagcggttttctggcggtgtcggtgagaggggagtaggctggtggggggcggttggggactggaagagggagaaagggggaaaggggagagaagcgcagaggggagggaggcgatggaggagcagaatggggtaagacagtgaagcaggtgagcgaggcaggcgagcgcgcgaccaaggacagacgccaggcccgcaagaaagggggaccgagcagaagcaggagcaacgacgaggaataaagggtagctcggtcagtcggccttccttccattcgagacctttaacaggcgcagagcgctgcgagtcggatcagaggaggaggagggacagactgtttgggcatgacgtgttaatctcgattccgatcctactgggctttccgtcgccgccgccgtcgccgagctcgaccctgagcgcttggatcgacagcatcatttgcttgagctcgagcgggtcggacgaggtgattgctttggcggtcggtgtgacgcagtgcagtgcggaggaggagggggtcggcggaggcgtcgaaaacaaagttctgctaacatgccctagctgggatggagaaaattttaaaaatttagaagctagatctccattcatatctgaagcgccttctcgggtatatgattattttcttcataatcaggattggagtccgaaaccattattttctgcactgcaagtttaccctttagcaactattttcaattgcgtggctggtttaccacaaggatttgaaagcacagtgtttccatggaacaaaacctcaagcacatttgaactcgatccgaccatctccgtttcaggaatgtccgatgaatgctttgctagtatcgtccagaaattttctgcaattgggggtttaataaaaaaagctttaaatgaattctctttatacaagaccaacatttctttttatttatcaaatttcattgtgaatggtgtcttgcagtatcgaaaggagtttcagcgttggcttcgtctttatgagtttcgtagattcggtctgattggtttaagtaatgccttctaagttgcgctcccttcctctgcttccgtctcctcccctcgtctaactctcaaactcctcgcctcccgtccatagacccgcctttgtcattgcatgcccgttacaccctaaaagaacctcggtcggcggtgctcgacctgtcgtcccctcggcctcacacacccctcatgtcgagcctgctgtacctctcgtcgaccggttcgccaccctcgcagcctgccggaccgtccataagccgctctctctcgcgtggtccaagccattcgccctcatcgctggctcgctggctaaggcctacgtcgaggaaccaaccgaggctcggctgttcgacttcctcgcgctgcccaaggcaggcctagctccggcgcttgagctcgcgacgtccgtctcgcctgccgccggcaaagcccatctcgccgcgtttcctgccgtcgactggccgtctccctcggtcgctcggccgtcggagtcatcgctgcctcgtcggatcgccatcgcttctcttcccctctgcgcgcgcagttcgaagctgagatcgcctcactccacaaagcgctcgaccgcgcgcgcgccagccactctgcgctcgtcaaggtccaccacgagcagatgcaagcgaccgagcagctccgaaacgtcgttcgcgagagggaccgcgaggcggtcgagagcgcggagacagtcgaggggctcagggcggatgcggagaaggtgcgtggtcggcgctaacgggatcgtgtgcggaaggctgactgtctcccttcgtcgtcgtcgtcgtcgttccgcttaccacagtgggccgctgaccgggatttcctcgagacgacccagtcgcgcctccttgccgagctcgacctcgcgcgcgaggccgaaacctacctcgagcagcagaagatcgaaaacctcagcttgaaggagacgatcaaccggctccgggccgacttggacgagctccgcttgagcgccgcggcggcttctggtggtggggcgggtgggggcgagggatgtggctgagcgtcggagggcaggcagcggtttggccggccggccgtcggagggacgattcagacgagacgcgcgcgcgcggccgctctatgctgatcgagctcgacgtcagcgcccgctggcaaaaggaaaaacaagcctgcgaagaatggagactacacgaattgaacgcgtgaccttatacatgctaagcatacgctctaccaactgagctaaatcccctacacaggttgttgcttgtcgtttggcaatgtgcgaggtgtatcctaccgtacatgcagagaaggagagagggagagggggagtggaggacagggacgagagggagaccggtcggagagcaagcggaaggacaggcagtggtgaatgagtaaggcaaagcaagaatcagggtagcaggcaggcaggcaagcagggcaaagagagcggttgcaggacgtcgtcttgctgcgcaccggcgacgcttcgcgctgcgcaggccgccgccgccgccgccacaacttcacctacaggagaggacgatgggcttagaaacaggaaagctggggaacaaaaggtgcaagcctcgctatgaaccaatagagctcttgcataaccagtctttatctttttaatgctgccttgcaaacgtttctgcggcgctgatttactgcatctaaactatgctcgctgagacgtttgcgccttggcgtaaaacaaaataatcagcttatgcaagaggtttgtttttactgtaaaaattacacgcgttcctgtacagaattttttctgtcagcttctcatcaaatagatcctggattatttgaatgtcactatccagaaaagggcggggggcacgcgtggagggtaaatctgtaccaaataacaaagcgtctggattaatttgggcaatggtttgcagtgcttttttaacatcaaaatcgactctcccaaaacctgaagcttttattttgatgccatgttccaccagatggagtaattgagaaaaacctgaatgtgtcatggttctaggttcagcgagtctatgagtcacgacttcaagggtatataggtccggaactggcgcttctgtcagaagcgtcattgtggtcttttggcccagtggtatcgtgttggttgccgggcacggttctaacagaatgacgcttctccaaggtcgcgagttcgaatcccacgggtcccactcccgagtcttccaggattcgcgcggcttagagctctcagtccagcagttcgcgatcgaacacaactgatcgtgagctgcggtcacacactctgatcataaaaggattgaaagttcggggcttgactatgtatccgactgctggactacgaacctgacagggggggtactgtcatggttctaggttcagcgagtctatgagtcacgacttcaagggtatataggtccggaactggcgcttctgtcagaagcgtcattgtggtcttttggcccagtggtatcgtgttggttgccgggcacggttctaacaggtaactgctggtatgttcggtcatttcaggcctccaggcttatccagatggttttcagttcagtgaatttttcaagggcatgcagggatttgtcgcgaccgttgccgctctgcttatagccgccaaacggcacggtcatatcgccgtcgttgtagttattgacgaagacggaaccggctttcaggcggcggctcatacggtgcgcgcgggagaggtcgcgcgtccataccgccgcgccaaggccgtactggctgtcgttggcaagctgtagcgcctgttcttctgatgtgaaacgcgtgaccaccagcaccggaccgaaaatctcttcgcggcttaaggacgcattcgggtcaacatccacaaagatggtcgggccgatggcggcagccagctcagcgttacgaccatccagcagcagttgccctttgctttcgccttcacgaataaagctatggaccgagtcggcgtgggcgcaatcgattaaggtgcccatggtgggcaggcttcagacggacccaggttttggttttttatgtggttatttcctttaaaacaaatcctgcctctgcttgctagtatgggtacgtccttgcgttgttaaataataacaattttcaaaaagcagctgaaaaattaaaccctttactgttacaggataatagtaatctcaattttcaaattgctatggctcaggctgaattaggtttatcacaatatcaatcagcactctcccgtcttgctgaattacaaaataattttcctgacaattatgctgctctaacggcatacgcccaaggattgttaaccgcaaaccaacctcaaaaagctacagccgtacttcttaagggtagtaggcaatacaaagaggacttaccgctttgccgagaattggcaagggctcaagctgaatcccaccagaaaagttatgcctattttactcaagcgcaatgcttactacttgaggggcaaaaaagaggtgctattgctcaattgaagaaggaggaggggaagggactgacctgcatgttcctcgcgcgaaagatcgacagctgaacctcgagccagtccatctcctcgctgccgggctccttcccgtcaaacggacacccatcgaccgccttgttcgagtcgtaccagaagagcgtgttcaagctgactaccgcaagcttgtccttgacgacctcacgcgtaaagtaggcgccccgctcaaagacgtgcgtctgctcggacgggacgtaggcggaccagatggagagaaacgactcggttatccggttcggaccggggtacatgatgttgtgtggccagatgtcgttattccctagcgaggggacgatagggatcgagggaaagacggacgacatgtgcgaggcgacgagccgattcgaggcgtaaatctcggccggggttcgggggagggcgcgcgagatgtcgtgccgggcgttgtcgccggtccctggcgagcgacgagcgacgaggtcaggggactatgacacgcttctttaatctgagaaagctcatcgtttattactgataaaaattgtccttccgaggtaccgtcacggaaatagataatacgttgtggttgttgtttagtcattgccctaaacccttgcaatagatataccacgatatccttcattccttcaatcacttcttgatgacgaggttgggaacgtgaaacagccgtatacttgcagccatttaggtctaccgatgccacaattgaagcaatcgaaacacctgttgcaccaaccccagggtgataaacatctccaccaagaataagagtaggaacatttcccaaagggttggatttgggtatcaacgagcaagtaattcctccaaccttgacattaatcttcatgcctaagtttgcacagtattggggcttgctttgtaaaatatgtttgctaatagcacattgagaaggaacccctaacatagtattgcaaacacgtttaatggaaccatatggtgggccggctacaacgatcgaaaggcaaagctcaggaggaggaggaggagggcgagcgcaacacttgtcactcgtccttcttcttcttgtccttgcagacgcccttcggcaagctgtaatcctcgacccggatccccccgccccaaggcgtcgccccgcggagtgcagcgtcgggcccgagcccgtggtcagcgaacgccgaccagatctcgcaggcgttggagccgttggtgagaatctggtcggcttggatgatggcgtcgcgggcgtcaaagaaccttcaacgggcgcggaggggtgtgtgtgtcaggtgagggccagagacggggggaggaggggaggaggaaggagacgtacgaaggccggcaaggctggagcttcatcccgttcatcacaagctggacagcgagggtgttgccatgctttggcacgagcggcttgaccagcccgcccaggacgtcgacctcggccggcagcgtgtagtagtcgtttgcggatggtggtgtctatgatatgaataatatcagagtgaccacacctaagcgacatattgatattcatcggggtaagtaaaaatggaactgaaacatagtattagtgattataccgaggctgaatttctggagtttgtaaaaaaaatatgtagagctgaaggtgctactgaagaggatgacaataaattagtgagagagtttgagcgattaactgagcacccagatggttcagatctgatttattatcctcgcgatgacagggaagatagtcctgaagggattgtcaaggaaattaaagaatggcgagctgctaacggtaagtcaggatttaaacagggctgaaatatgaatgccggttgtttatggatgaatggctggcattctttcacaacaaggagtcgttatgaaaaaaataacagggattattttattgcttcttgcagtcattattctgtctgcatgtcaggcaaactatatccgggatgttcagggccttgttgagattccttctgcaggcggagcattccctgttaaagccatggcagaaggaacaaacaaacaaaccggtctaattctaaaaacagataacacacctaccccgacactatctcccaataccacgaataaaacgggacgtgtcaactactatgagttggaaaaaaaactaaaaggaaaaaatgctttaaccaataaaaaaataaatgctcgtttgcactatgtgcttgatggcaagatgaatggttatatttggaccatgaacaagcaaagctggccagatgtcacgccaaaagtaatccatttcggtgatcgtgttgaaatgatctacgaaaataaatcctctatgtctcaccccatgcatttccatggtcatgtctttcaagtaaccgaaattgatggtcagccattggatggagccatgcgcgataccctgttagtccaaccgcattcgacagtgaaagtacagtttgatgcgctaaaccctggcaatggcatgcgagccccccccccccctctttctcgcagatcaagcaactcatgggccacacccgcctgacgaaatacattgtcctctcggtcgtcatccttcaactctcgctcgccatcctcttctccctttactccatccacccactctcgcccctcttcctcgccaccgcctatgccatcggaggaacggccaaccagaatacatttctggccatccacgaaatcagccacaacatggcgttcaagggcgtcggcaagaatcggctgctggcgatggtcgccaacctggcgatcggcgtgccgtattcggttgtgttcaaggttcgtccgtcgtctcgctcgctggcttgcctcgcacttgcgctccataagggcgtccgaagtcccccccccccccttctcgctcgacgatgcagccgctgatttcctccttcccaccttcctttcctctccttcccttcctgtcggtcctcccccccctccctcctcgcgggctgatctgagagagagcgcgagcgaggggccgtcgggccggatcaaggaagaagaacgaagatgaacggtacgagggccgacggggtctgccagttcgtctgagagccttcttgtaggcctggaatcagggagagaggggctggaagggcgaaggggggagagagtcgtgtgagggggttcggcttgaccgtcggcaggcagaggggtgtgctggctggctgtgcgaggaggggcttcaagaggaggcgatgctgttgctttgcaagagaaagagagagaggaggttgaagaggagagagaggagaggagcggagagggagggggggcagcttgtattccggccttcgctcctcctgtcgtcccgtccttcgatgccagtaagctcgacctcgttctcccctagtcgttcggccgaagtctcttgcgcccgcccgacccaccgctgatgcgtccgtccccgggcgcggtcgaggttaaccttacgcccgaggaagaggaagtcaggatcagtgttgggccgcttgcgagggtgcaggagtgagaggaagagaatgaggagaaaaaagcggaggagcaaagggggaaagttgaagcgggaaaagaagaggaagagggaagggcccaaaggggggtgaaagcagaagaaggcagaagaaagcgagaaatgacgagcgagcagccaaaggcacgagccaaaacggaaacgaagagagaccgaacctttgacgccctcgatcgaccagtcggtgtctgtgtgcttgaagaaggcttcggagaggagggccatgagcggaaccttagtgagcgtccgcgcacgcacgcccatgttctcacgagttcagcaaccgcggtcgaacaggggaggtagaagagcaggagcaggaggagaggaatggcggaaacgcgcaaacgcacctcatacaaaatcgtctcggcccaccgacccttgacgacgatctcgaccctccccatttccggtgtagatcgagtcgttgccgacgtactgcccgggggaagaggagggggagcaagagggacgggaggcaaagagaaggacggttttcgtgtcagggcagtcaaaaggagaggagaaggaggggggacagcggacggaccatcatgtacgagtccatatagggcgcagcgttcgtgacgagcttaaacgcctcggcgcagcatgtcgcttgcagttgcaagaagaaggagggggcgcaaaatgggcttttcagctctctcgtccactccagcacagctaggagatgcgaacgacgccgccgcctcgccgaaacgcacccgcgatgaccgcattcgtgctcgcaatcgccggaatgatgtttttgacgaccccttgcgtcaagctccacgtgacgccgtcgatcttaaagtgctcggcccgcgtgcgggcctgggcaaagagccagtcgatgtcggaggggtcgtcgttgtcgattttgcggtctgcgcctacccacaccacgcgctcctcatcctcttccacaagctcacccggctcctcgccctgccccttcgcgtcctgttcgtctttgacggccctggccggccaaagagaaagaggggccggaacgtaagggttaagagggcggtcggggaggagaggcggatgagggagttgtgcgaggcgtttggctttgggtgctggacggtcggtccccttcctctcctcctcttctcttcaagctgcgagacaagacgaagcggcgagagcctctcggccccccttcgcgcgcaagacccaatagcgctgaccttccccccccccccttcctttcctcttcttacgacttaggccccaggcgaagccgaggccgagctcggctatctgagcagcattgaccggctcgacctcgtcatctcggaggacgtcgacgcgatgctcttcaagacgcgccgcctgcttctgaggacgtaagttcgttcgccctctccatcctttcctcccccctttgccccgctgccaacaaagtccgcgaaaagtggcttcccgagatccaggagcactgcgcagacgtcaaggtcgtcctctgcgcgctcaagtgcgacctccggactcccccttcgcctgagccttcgaccgctccttctcttgcggttaacgctggcgggcgcggggagaaggagtggatggcgggccgcgatggggagaaaagcagaggggaaggggcaatcacgtacgacgaggggctcgaggttgcgaagctcatcaaggcgaggtgcgttttccggctcgtcggtcggccgcgccgcccaccctcccttctttgccctcctcatcacttctgtctgctgctattgcgatagcggtcggccgagcgcttgctgcttccaggcacggcacgcacgcacgcaaccgcactgccctacctccttccacccgtttcccgcgaacaaagaaaaaagacatctgacccccccctccccatgcccgctaatgctcgctctcacgctgtactgaccactgaatcaaaggtcacgatacgcggacaaacaactatccccgcgccagtgcgtgaggccttaaaactgtgaggtagcctgagtttaacggacactccttcctgaaatagaatggcatcagaaggagctaataatgagcagaaaaacccaacgttactctaaagagttcaaagccgaagctgtcagaacgcttctagaaaatcaactttcgaatagtgaaggcgcttcgcgagtatctctccctgaaggaactagaggacactgggttaccgccgccagaaaagggctcggtactcctggttcccgcacggtggctgaactggaatctgaaattctgcaactgcgtaaggcgttaaatgaagctcgccttgagcgagatatattaaaaaaagcaacagcgtattttgcacaggagtcgctgaaaaatacgcgttaatcgaacaatggcgaccctcccttctcccttctcctcctacccgctcgctgctgcccgctcgcgcaagatggcttccattcccttgaaccagacagccgatggcgttcgtccttcccctcctctcccctctctcttcgcgcagcacccgcctttgctgacccgcccgcctcttgccccccgaccgaaaacagaacatcgtgccgctcaattggcttgagacgaccgctgtgtacaatgtcggggacattgcgtggatcctgacggcgaccggtgcgtctcgtaaccgcttgtcgtgccttgggggaggtagcggaggcgtcggcgatggccggcttcgacgggacgaccccgactgaccctcttcctccccctttccccttcttgctgtcggcctactagcgctcgtcatgatcatgattccagggtgcgtcctgtttcgtacccctgccctcgttcagacccgcgctgacaagaaccctcgacttgcgcccccccccgtccgcaatggtaagcgtcgaccagcaagaaatgactgagcgaaacgcaccgcactcgaaatgtaccacgtcaggacgccattcttgaggacgaaccaaaacttggacccgcgcaggtggcgcttcgacttttttaggagcgggccgtttttaagaatcttgttctgcggcgggtgcgcacagcagttgggggggaagaaaggccgtcagcgacggctgttgggacggaggaggagggcaacggagggacggacctcttgcttttcgggcatatgggcgtagaagaggacgtggccggtcgtcacgtacatgtggccctgaagcactgtcgcagcggtgcgagaaaggggaatttgagggatttagcgcgcatgcccgcaatcccaaagggcgaggaggccaactgccgccggcggggcgccgcaggcgagagaagcaacacgaggaaaaggaggagggagggagggaggggggcaacgcacagaccgaccccccctcccttcctgccacgcgcgcgcacattccagatcatccccatctcgcaccacacaacgatcgcctcgattccagccgacgaaaagccgtctgtcaacgccgagattgggggcgttctcgactcgctcaaagcgtgctatgcagcctacggccattctgccgttggcttcgaggttggccggctgagcgcaaggggcggtcacgcacacattcaggtcgtccctgtcccttctacgctcgcgccgtcggtcgaggaggcgtttaggaaagagggagcaaagagcgggatggcgtttgaggagcagaagacgctcgatgggaaggaagggagggacaactactttcggctgattttgccggacgggaggcagcttgtccattggcttgagccaagggagcgctttgacctccagtttggccggtgcgtcgtccctccacgcgcggcgctcctcttcagccccccccgggtccctccttctggtgctggttccggcatggagggcgcgggcagcaagccaaaggagaagaagcggatgagcgaggacgagaagcgagcgttgcatgcgcgcatgaggaagatggagtcgttcagtcccccttcctttgctcctcttccttcgaccttggcttggcttttcctgcccgactctccccccccccgtatcttcttgttcgcttggaacaggtcgctcaccgaatgggactcggaccccgaagaccttccaaccccctcatcctcaacccacccctcgtccgccgccgccatcgccagcggaagcagcacctcccggctcgtcgtcctccggcacatgtttaccctcgccgagctcgaagaggacgcgacgctcctcttggacctgaaggaggaggtccgggaggagggcgagcggatgggcgaggtgacgagtgtccaggtctgggacgtgagttcaaagtggggcttttttccctcgtctaatccttcccctttgtgctgcgctgcgctggcggttggctgacggctgaagccatccgcccccccacccttcgtgcgacgctcgcccgctcgctcgctgacaggatgaaggagacggacgtccagaagctccaggacgaatacgctcggctcgttgccggcctcgacgccggcggcgagcctgaagacgattcggacgccggcggcgccgggcatgtcgtcggccgcgggcgcgaggaagacgatctgctcgcgaacccggtcctgccggcagatctcgtccaggaggcgatcccgggcaacattcgcaaagccgagcactttgtcgcgtttatgaagcgcttcatcgaatacctcaaggtgcgctttaatacgattccaccttactctcggatcttctctggggctgcttgcgtctttaatcgcgcggcgagcgagcgagcagtcgaggagctttcagcctcgccgtcccccgcccccggtcaaactgaccctagaatatcgtgaaacttggtaagtatgaaaaggaaaaatatgtttttttcgataatggaaccaagttttctaacattattgcttgcttagggaaaatccctaattatctaattaattcatttcgtccctctttcttaaaaaaaaacctttggaaataagaaaatgactgaacctctagatttagcaattattggatttggtcccgctagtctttctttccttattgctttgcatgaccattcggaggagcccttaaagaacaaaaaaatccgcgtgtttgaaaagttgcccacgttttcctggcatgagggtatgctgattcctggttcaaacatgcaaatctcatttgtaaaggatttggcaacgcccagggatcctacttcttacttcacctttttaaactatctacattcgcatggccaggaacgattatctggtttccttaacatgtccaccctagagccatctcgttacgaatatggcggaagccccgaacgcggggggggggggggggagcactgaccgacctgctccttgcccttgaagacgtacagccgccagttgagcgtcggcttgcgtgcctcgggcggctcattgtacttgaggacggcgcccgaggccgtcatgttcgtctctgctgcgagtgctctgtcgtgcccggccggcagggagaagaaaggaagggtgagaggggtcagagacggagggcgggtgagggcgagctgaggcgggaggggacggacccggaagcctcgaagttaggctcgacggcctttggcggcggcggacggtcctcgagtaccggcccgccctgggcgtcggcgcacagacgaggcggcggggtcagctgtctgtggacgctcaaccctggaggaggggccgacggcgttgccgacatggcgtgcgctgacggaagctcactcaccccttctctcctaccgccagctgcaggactccggccccaatcctcgcgtttgacgcctacgcactcacagacaccgccgaagatgctcttctaaactcccgtcgtctcaacccgaccaccaacatcaacctttacccagagtatgtcctctctgctcgtctgctcgtcggcggcgggcgtcgtgctggctgcttgccctcagcggcgccgggcgtcggttgtccgttctttcctcgtcgtcccagccaagcctgacgctcccttcctccccgctttcctatctcgcccgccctgctagtgtctctccccgaccccgaccttccagtaccctccgtacttttgactttccagtctccctccagcatgggtgcgtccctccgtcgtcttccatcttttactcgctgggaagctggctgggagtcggccgattgctcctcgggccggccggccaacgcgggcggaaggctcgggcgacttttgcttccgaggccggcgctggggcgagtcacaccagggtgggcaggggcaggattgggcatgttgactctagaggatgttcaggcgagcttgaggccggccggactccgggagacgagcaataaacgagcaagcgagcgaaagcgcgtgggcatgatggcgaagtgttgaccgatgatcaatggccgggacccctcgcaaagaggatgcaagtgcggcccgctctcatgcctgctcgagcttgcgcgtcgtcgtccgctcggcctcgagccgcgccttgttcgcttcaaatgcagcatcgcgacttctccaatcaattgtcaaaaaccccaagggggacgtcggtcgtgtcagcccttgaacgatgtaagcgccgaaagctaagaaagggacgggcggacgcaccactgctggaggcccggacagcgatgctcctcgggcagacgatgggtcgagcagaaggcgagcgagcagtgcgggcaggtgccgatcagccggacggccgggttggggccgctgcccgccacggcagacgccaagctcgactcgaaatcggccctccacctcatcaacgagctggccgacctccactcgtgcaacaacacactctactttgaggcccgccgccactctgacctctacctctgggcatccaagtcgcccaacggtccctcggcgaaattccacgtccagaacgtccacacgatggacgagctcaagatgacgggcaactgcctcaagggctcgcgcgggatcgtcagcttttgtggcggctgggacgagagcgaggagtggcggctgatgaaggagatgctcacgcacgtacgttcccccgcccccggccggccattgcttgtgccctctccctgctttcttgggctccggtcgggtaaatgccctcgagctggcaagacttctggctctgctgcccctcgcagcgtcctgccgttctttcgcccgaacgaagaaactgagcctccccctctccccaacccgaacgcgatttcgatgatttacgcgatcagcggcccgctcattgccatgatacttttcatcatgcctacgctgtcaacgtatctcatcccggcgcttaaaccctggcgttccatcggaaatctgattacgctgatcgtgggtatcctgtgcgtatcggtaatgttctttagctaatatcagttgtggatggttcaaaattgctacaattttgaaccattccatttttcataatattcatttgttattattccaccctatcacttctcccgtcatatcctagtattatcagttagttaaacacacaaagagatctgaacatcttaaataagactatttaagatgcataacttagattcgcaagatatcttctggtcattcaaaaacaatttgcgatatagatattcttataccatgagatagttatctggaccgctctcaaccatgcaagattaaatcagtgaaacataatcattattcattactttgtttcgttggataatgcgactgccaaagcattacttaatttaacgaatcaaaacacttcagataaagcgattgattacattttaaacagctttagattcactggtattatgtatattttggcttatctagcaggcttcatcactttttggaatcgacatacttatgtgtggtggtttatgtttgcagtttatgtatcaaatagtttgtttacgttgattaatttatcaatcacaattcaagcaataaaagctgcacacggtgcgtacttaacattgccaattttaattgttattataggttcggttgcattagcgatttatatgcttgttgtttctatcaaacgtaaaagtacatttaatcgctagaaaattgattttaacaataaaaatatgatatactacttgtcgtatataaggaacggaggacaatttatgcatacatttttaatcgtattattaatcgtgccccaacccgcccagcaacgcgcaataaggcaatgccttcaccggcacgttaaataccatggcgaaccccaccgccggcaccgccgccagcaccatgtcctgaatcaacgcccaaatcagttcaatgaccatccgtgcagcccccatatcgccattgccgttaccacgccaatacaggtcgccagcgtcagcaggctggccatcgtccaacgtgccaggccggtgttgacatggcctttgaacatatccgccaccgcattgatcagcgggaagccgggcaccagcagcagcacgctggcagccatcgccacggaggagctgtgttccagaccgggcactcgcatcagcagcccggacgccgacgtcgccacaaaggcggtgatacagaagttaatcaacggattgagatgccgggcggtcagcacctgccgcacatacatcgccataccgctggcaagcaacgtgaccagaaacccgctgcgggacgcgcatatttttcgactgcgcccagactttgccgtccgggctaatgatcctgagcgaaaggcgttcctgacgggcgacgaactcgaacagctcctgctgccaaaggtctttcggcccctgacgttcgctgatggtagcggcgatttcctgctgaaaacgcagcgtactgcgcaattcatcttcatccttctggctaagctggttgcgcatcgtggagtacagcagccccgaaacgctgtacagcaccagactcatggcaagggaaaaataaagcgtcagcctcagggtgatcggaaaattacgcggtatcagcatcatttctcacttccagtacatatccggcgccacggatggtgtgcagcagcttgacctcatagtcatcatcgattttgctgcgcagccggcgaatcgccacgtcaatgacgttcgtttcagggtcaaaattcatgtcccagacctgctcctctcagctcggctccgtctaaagcaagactgacctcttccgttccgcctgacctcgcctcacatcacctcgaccatacatccctcctcggtccaccccgtcgcccgccccttcgctccgctcgctgcgctcgcgtcgactcgcgcaggacgacctcgccgcgattgagctccggaaagcccaggcgctcgagctcaaggctgccaaggagaagggtcggtcttttctcccttgtcttcacatttcccctcttctcttcctgcttcgtctccctccccccccctccgccgcccgcgacttcctcctctgcccttccgccgtccttctctcctctctccctctccttccttccgcggcttcccgcgcgcgcgagcgcggtcgaagagccgtactcaatgctgacgagcgcttcggcggccgatcaacaacagcgcttaagggcggccctcccggcggcggtatcaagaagtacgtcccctcctccgccctcctgcgtgtaacctacctgacgcgctccctccctctatccgcgccgctcgagcaggcttcggcaatccgccgatgttcggcgacttcgaggcccagaggcattggcttgagatcacgctccatctgcccgtccgcgagtggtacttctacgacctgccgtactggggcttggactgtgcgtccgcctttcttgccccgtctttcaatcttgatccttcacgcaggggccgcgacggatgaccgcactgaacccccgagtccctcttggcagacccgcccttgacggccctccactcgcgcctcctcgcccagctcgcacacctcctccacccgccctggctcgccctcggcgcctcgcgcggctgcgagtcgcccggcctaagggcgttcatgcgcgcggcggcgttggcgacggaagtggccgtttgggggtcggcttgctgggcttgggtcgagtggggtttggggagtagggcggcaatgggccaataaattaatttcgcgaggtattcagacggcttatgatttggcaatgaccaatcctcaccttctgaagaaatgttttaacgttgtgttgatgcgtaccgccatggagcttcaaggaattgcttgtggcggtttagaggcaatagagcctaagcaaagtattatgtcatctaaaagttttggtcagatgcaaacccaacttgcttcgattgaggaatcaatcagtagccattgtgcccgtgcggtggagaaaatgcgtcgccagcaattggtggcgaagcgcatggttatatttgtgcatacgaaccgatttcgggaagatttggctcagcactttcagtccatcgaatttaagctgattaatcctacagatgatttgcgcttaattaccaaaatggccaagcgatgtctgcaacgcatttttaacccagggtattactataaaaaggctctctacttagatttaacccccctttaaagtcaagatcgcccctttccgatggactctttctctccgttcctcctccttctgtatctcttcaatgggcttttcccgcgctcgcaagtgagaaagaagaaggaggagcatgcagaggacgaaagtaagaggggggcggcagagcgcacgggcgaaggacggaagaaggggaagagggcgagcgagcgggcaagatgcagactcggggcgggggcgcaccgggttggtggcgggacgaggggcgaaaaatggcgggtgggcgttgtggggaagggcgctttgagggaggtttaggtagggcgcaaaggggacctacggaggatgggagagcaaagggccagaagagcaggaagggtagggcaaggcagggagagagagagaagaccacccgggtcgagtcgaatgagggagacgagtgcggacggacggacggagtgagagagaggttgctgcacagggcggggcgcgatgggtcaacgtcgtgcgttcccttccgccagcgtcactcgcaaacacggccttctcgcgctgacgcccgccctcctcgcccagtcgacgctcctctcgctcttgctcgtcctcctcgccgtcctcaacgccctctacctcttctcgcgcacgcggcggtacacgctcgagatgcgggccgacccgcgctcggtcggctcgccaaacgcgcgggtcgtcgagctcgacgacgagcggccggtcgaggacgacgacgatgcgtttggtgcggaggatgggagggggtggaaggagaaggtgcaggatccgaaggtgtggcttgcaggcgggcggatgctcctgtcagtcccatgcttccactctagtcgcccagacctcgggctgacgactgacctcctcggccctcgctgccagaccctacttgaaccccctcccgccactccgtttcctccgtatcagctgtcgcagcgttatccgcgcacaccgtccaactggccggcggtgtttcgttacatcgccacgctggcggaccagctacgcaaaaagggcgtgttcaacatgctgctgtcggatgggcagttcgtgatgggattcagttcgaccaaactgcactggatcacccggcgggcgccgtttggcaaggcgaccttgctggatgatgatgtggaaatcgacttccagcagcagaccacacccaacgatgtggtcacggtgctggcgactcagccgttgaccggcaacgaaacctggcacccgattctgccaggcgagttcgtcttattttgttttggcgagcgtgtaatttgacgcaggctggctgacgggcacggactggttaaccacgtactgcccgttaagcaccgataccgccggcggctggtggtttttgttgaagtaggcgtaaccgggctgcagctgactccagaccattatatccattactaaaagctgaacttgcacatcttggaaaaggaggaaatcctgctgctgcctccgatctgtgtcgctggatccctgagttattcaatgaagggttttatgtggatattgatctccctgttgatagttcaaaaatagtagaaggacatcaaattacaggaggagttccaatcatgctcaatatgggctccattatcagtgaacccatagctccacatcatagaaggcaagaagctgtttgtatgaatacggacattattgcttattccaatgataaaagaactcaaaaaatgatggatacggtcgcccgatatttgaaaaatatatacgatgatccatatacagcattaaaagacacacctcttgcgcaaacggctttttttaataagtgccaagaggaaaggaaaagtatatttgatttaagaaaaggattacaagatgcatttcgctccgattcattaataataaacaaaacggtaatgtctttttaatgtgatagacattaccgtttttttagtggttgtttttattatcagtgctttatatttaaaagcttatcttgattgaagtcatttaaaagttttggagaatttatacctgtctgtatcgttttaaaccaacaatatttaagataataaaggccatgataaaaatcattagaattagtaaatcgaaccatatattactccaaacttgccccttaatcataacattggttaaagcatcaccagcatatctgagagggaagatatagccaatgttacctagccaatcaggcatattttcaagtgggaaaattcctgaaaagaatacctgaggtacagcaactagtggaataaattgaatcatttgaaactcagaattagcaaacgttgaaatgaaaattcccatagataatgctgtaatagctaaacaaatattaatcaaaattacatactttccacttcttctccagctaatcccaaaccctgtaacctcctctttcgcccggtgaggaaatctgctcttggaaccgtcctggcccgctctcgctctcgctctcccaagttcaattctctatgttgcgctgctctccgcccctctctcgaatcagaagtcgttccttccgtcttgactctgctctggcgtgctgtgtgctaggttagggcatttgagtgggagcaacaacggcgaacgagcgacccaagcgagcgaacacaagcaagcggagcgtcgagtcgacggcgctctcgtcggtcgtcgacgacgggattggtggaaggaaggggtctaggaacttcgagagtcccgtgttgacaagatatgcgcgcgagggagggggaagaggaaggaggagcgtggctactgctcgggcggggcgaggaaggggttctcgatctctacgtgaggacggacgaggaaggcggcagttattgctggctatcgttaccattaagtacgtaattgataactcccagccctcgtgttgccccaataggtacgccaccgcgccagctgtcactgcaacaaagatctccgtaaccaatcccaacaaattgccagactggcgaccgtctcggacatccatcaggaacgtgcctatcccaccaattactgaaagcaggagcgcaatagcaactggagctaattcctgtgtgtcaagcacaagttccctcctacgttgtcaggaggtaatggtatgcaaagtaacttctcaaccggtcatttgttgcttaagaggcatttctattgaggtacgaatcaataatcctttgtaacttttcaagaatgagcctgttattgatgctgcaaataatagtcacgcaattctgaagactttcatccatacccttatattccgcgaaatacatgcctataaagcctgcaagtacggcagcaataccatatattggcagcaacagaaggccggtaaaatgaggtaatgcaatctttaaacttagttaacttcggtattctattgcaaagcacacaacggcctacaagattgcatgctagctctatatatgtagactcatcgcatgactgtgttccatctcctgtttggatgatcgaggaggctaacgaagaagtatcagaatgaactgtctttgctgcataactttggtaacttggatcaagaaaaattggaatgattgtagggatatcggtaaacttggccacagcacttgtgtttatagactcagagcaagttacagccgaatttggattttttttatgcacctcaagtaatcgtttccaaaatgaaacatttcgagggctgagaatctttttaaaacgtaaacatgtattggggaggtcatggataagggtatgtcgttgttttctatatgaaaatgcaaagggtaacttctctattgctcttgttgcagagcggtattaacggagtggaattcgattttgtacgggcgatcaccttccgggtataccttaccgtacttgaaagcaagatgaatatcgatagcccgctgaatgaactcttctacgccctgctggatccatgaggcacgcatggcggcctgaattgccgtgcgcaggaatccaccttcaccaagcccgccggacatttgatctgcccaccccaggagggtgtaatcgaggccaagtgctgccgccagctggcgcatataggtgagaatgtcttcaatgccgttgatgtcagcctggatggtctgagtatcaatagtcatctgtcccttgccgtcgcccataataggcagcagggtattggttaccgtaggcatgttattcgcgccacgtgcgcgtctttccatcaggtcagctgctcgtttaagcgtctgagtaatggtgcgcgaataatcggctgcttcaaagataacgctttggagtaattgaggggcacgcccttgccatactcatacattaaagccaaattataagcgcctagcatatctccttttgctgcagcattttcataggcttttagtgcttgagcataattatcatctaccgtttcataaataaaacctaatgctacatcggctttagataaatgtttcgctgctttttgataccaatgtttggccaaattataatcaggttctcctgtttcacctagttgataaaattggcctaataagtattgtgcctcaggattgccttgttctgccgaagcagtataccaatgttgcgcgccagcaagatccggtgcggcacccaatcctttttgtagcatataagccaattttaattgtgcatattgatcgcctttatcagctaagccctgataaatttccttagcttgattgatttgttcaggaacactgctttgagataaataaagcatacgctgcagctgcagacttcgctcgatcaggaagagcgtgcgaacaaggcgctgaggaagagcgagcgcgactttcagcatgcggcgcttcacgactcgctgacgggcctcgctaatcgaaaacatctcaacgacatcctgcgaaggctgatcggagaatacaagaacgatccggcgaagtccttccaggtcctgttcctcgacatccgcagcttcaagaacatcaacgacagtcttggccactcgatcggcgacaaggtgctgatgatcgccgcaaagcgcttcagccggatgctgaataaggacgatgtcgtcgcacgcatcgggggagacgagttcgcgatcgtcctcaagagcctcgagagcacacacaaggcgcagaaggtcgcacggcggatctacgacagcatcacgcagccgttctcgctgagcggcaaccgcatcaacatcgacgtcaacatcggcatggtctgggaagaggagagcggcggtgaaggtggatcgggtgcggaggaggaggaggaaggaagaaagagaggaggggagggggttgttgagtgctcaagatggtccgtctgccaggccaggttcccgggcacgcggcagttgcaaacgagcaaagtgagagcccgcgctccagtcgaacgttgtctgcgacgtctgccatcgcagcgctcaaagacctcccctctggcatactcaaccctccgctcggggctcgagtatcgcagcgaatcgaaacgcgaacacgggggtgagggggcggaagaaggggaaaaggaagcggaccttcgctcccatcgaccggcgaaatgagcacgatcgtcggacccctcaggaccgtcagaccgagcgtccgtgtccttttcaccggcactgcgtcgtcgtcgaccaaagcagcctgtgtcagctgcccgcgcgaagggggaggggagaccacttagtggaatgtatggctttgcccttatcacagggaaacccatcttatctctgcatgcctccacctttcttttaggttttgcattcatcacaggaacacaactcaccctgggcttgattgcatatgagaagcatttcaaaaaagtaattttagccttggctttagttttctcaattggaattttttatgggggaagtattcatctcatcgagtcactcttacctaatctaacaggatttcctcaataccaattaagcagcttacaagtcttaactctgattatcttcttttccctttggcttttattcagcatggggttattcaaaaaaatcagagagaccagactttgggattggttttacatgtacatgtttaacgcaagtacgcctcaccccaaaactattacggcaaatcgccacacttattactattaagaaaaggagtcaacatgagtagccacatcacacggggggggaatgggggaaggggggggggggggagcggtgaaagcgagactgacctggctcgtcgtcgtcgtcgtccccgtccctgcgcaccgtcctcctcgtcaccctcatcaacgaccccccgtccaggccgccgcccgccagacgtcccgccgccgctgctgttcgtcctccttcgcttcccgctccctcgcgccgctcccgctcgcgatgctcgtcctcctccacttcctccctcttcgtcctcccctccgtcatcgtcgttgtcgtcgtcgtcgtcctcatcatcctcgtcatcgtcgtcctcgctcattacccccgaacccccagcacccccgccagcgccgccgccggcggcgccgtcaagcgtcctgaggatatccgtccgtatactctcgagcaggcgctgtttcctacaagcgtgcgcgccaacgagtgtgccgagaggagaggtgagtgagggaaggagcgttgagccgccccctttcgtggtcgtcgatggcggcgctgacggtggtggtggtggtggtggtggtggtgctggtgaggagggtggcgtagcgctcgcgcgcgagccggccagagttccacgccctagcatccgaggtcagcacgcagttgcagaaaggctctcgtgtcagccccttctgtctgtccctctctaaagtatgacaagccgcaaggcagcctgccacaggaaaggagcgaagacgagactcaactctttccgcccgaaatccgttaatcctccgcttgaaaacgccccgaacttccaaccgcccggagcacggagaaactcccattcgccaaggagcggctcgcctccttcgctgacgggccggagggcgcgtgcgtggtgcagtttgcggagggcggaggggacgaggggcgttgacgggtctggtaaatggagtgcgttgtcagcgcggaggagggggctgcagcaccgcctcgtggtagcgaatatccgcttcgttaaacgcttcgcggtcctgattgttggcaatcatctcgttcagcgccgattcaatctgcgccagatcgctggaagtcgcgcgctctgctgcccaacgggcaatcgccggttccaccagatttcgcacttcgctcatggcactgataagccgtgggtcgtagtcattttccagcacccattgcagtacgtcagtgtcgaggtaattccactggttacgcggtgccacaaacgccccgcgataacgtttcatttcaatcagccgcttcgccatcagcgaacggaacacctcacggatgatgttgcgcgaggttgcaaactcctcacagagttccgcctcagccggaagcggcgagcctggcacgtatttgccgtgaacgatctgtttacccagcgtaatgacaatgcgatcggttttattgagagtcatgggccttatgtcattggcgaagttgttgaagatagaaaatatgctttagcatatacacctgaaaaattttatgatagaaagcaaattacagtaaaaacttatcatgaagttattgcaatcaatgatgaaagacaaactgtatctgtattaaatagaaagaccaacgaacaatttgaagaatcatacgataaactcattttaagccctggtgcaagtgcacatagccttggctttgaaagtgatattacatttacacttagaaatttagaagacactgatgctatcgatcaattcatcaaagcaaatcaagttgataaagtattggttgtaggtgcagggtatgtttcattagaagttcttgaaaatctttatgaacgtggtttacaccctactttaattcatcgatctgataagataaataaattaatggatgccgacatgaatcaacctatacttgatgaattagatttcttaccctgcgctctcgtcccggctcacaaaggccggcccgtcgctggcgggccgaccgtccagctgctcctcccctcggctctctcctcttcgtctatgcctcggcgcaccgcttataccctcctccgttgttccctgaagcgcgccctttccctctgtctcgccctgctctatgtgcggccccttgtaatcgctcgcccgcatcagtcctccctgtccctctctctcctaggtttcacccgtcgcccttcgtacacccgccctttcactcactcgtcctcttccccctccctccggtcttcggcttttcgcacaccttaatttgaccggatcatgcatccccctctttctctatcctttggaccggacgaaaggcaaagcgacgcatctaggacgtccgcgaaaaaaataggagagaggggagggggaaacgtgttggcctcgatgaagggccgtcacgaaccgatgatctctgcccttcttcaggaggtcgagcgctggatggatcgagtgggggtgtgaaacgtgatgcgcgtggtttccggcttcacctctcgactcctgcggtcgtccgtcgcgacagctccctccggtgcgctgggtcccctgttgctcatcagatcccattctgcaagcacagaaggtcgtccgggcttaaagagtgctgaaatggaggaacagcagccggtggcgcgggcgcggccaacaagaaaggggctgccggccggccgacttccgtcgcgctcttgtcgcccatcactttacggagcgagctccggcctgcgtgctggcaagcaatcgcgtcagccctcttgctcccgtctgcgggctggctttggtgacaatcgccgacgacggctctgccgcacctggcggccctattctcgccccatctgctataattgggagctctcaaaaaagggtcaccgttgtaatggttgtgcaagctgtgattaattggacaactagtggttcgtttcctatttatatctttttatttggttattatggcaaattaaacagttttgggttataaaattcattgatctatggcttttcctcgttttagtaaaaaattattatattcataaaatacgcttccaaaaaacatgtaccttggttgaattctttcaattagtaccttgctcacattcttcatgaggaaacctcatttgtggataccctggattgtagccagttgttggaattgatttgctgtgcgaatgagccgatgactttttgaaattggtccatcatttgttgctgagtcatttctggtttgacgttgctacgccattgtctcattatatcacgtacaattgccataccttcttttttagatttcacttcttgagtatccccttggactccagagtcttcagcttctaattcgggtaagggaagggcgggagaggtggtgagggaggaagggagtcagccaatcgtgcttgccaatgaatgcccaaccaagggacgagagaagggaggacgcacccggcggccaaacgagaaacacgaggccggcccggacgaggtcgaacgccgaccaaccgctcgacgctccagccctgctcagcaaacccgcaagcctcgctccaacgcctggcgagcccccgagcgccttctgaacgctcacgaccgccggcccgagtggcgcggggaggctcgaaagcgtagggagcgaaagccacgcgccccacgcctcggcccctgcgccgagcgggtaaagcgcgatgaaggtcgagtagcgcagccaggtgagggcgcgcggcgtcaggttgaggagggtgagggcgtagaaggcgtagcggacggtttcggtcagggaccaggcgaggagcatgagtgggtaggcctaacaaaacagtgcaaatcgaaaaaatgtgggttaacgattatttgatgatttaattatgatttagtttcacggtctatgattgagcggctccaccttgggaaggatgcattgaagaatcaaatatttgagtaattccaatccttctttcacgaataattttcttcttttcaggcgataaacgtgttgactcttcgtttttctgcaatgcttcttctgttgttgactcggaatcaagcgtttgtcttagcttttcttcgtcatatgcaagaacatcttcagcagttatttgtattgccgtaggatttcttcgtaacatgttggagatactaacaaacgtagtacacaaatgtggtctgttattaaatttatattcagcttgattgaattttatttacattcaaggatgaaaaagcaagagaggaagaaagaaactcaccttagttgcaatgcaatgataaaacacacgcacaccgtgcggcggcctttgccttcacgctccgccgccaccgccatgccgaggccggcgctgatcgaggttgacgaatggccgaccgacagcacgtcgtattcgctttcggcacgccacgggaaggggtgcaagccgttcttttgccggatagtggcgatccggtcgcggcggccggtcaggattttgtgcgggtaggcctggtggccgacgtcccacaccagatgatcgaacggcgtgtggtagacgaaatgcaacgccaccgtcagttcgacggtacccagcccggaggcaaagtggccgctggagcggctgacgctgttcagcagatattgccgcagctcatcgcacagcttcggcaagctctctttgggcagtgagcggagttcctcggggttttccgctagcgccagggttgggtatttggctatatcaagactcattcgatactcatatcagagtaatactgctggcaacacaactgtggtggttaactccattacagggattggtgagccgacatcgacaggcattaaagtggttgatttcgcagctgatcccacgcagtttcaaaacaatgcgcagttcagtctggcaggcagcggctacgtcaatatgggagcgtatgactacacgctggtggaagataacaacgactggtatttgcgatcgcaagaagtaacgccgccatcgccacctgatccagacccgactcccgatcctgatcccacgccggatcctgatccaacacccgacccggaacctacgcctgcttaccagccggtgttgaatgccaaagttggcggttatcttaataacctgcgggcggcaaatcaggcgtttatgatggagcgacgcgatcacgcaggtggcgatggtcagacgctgaatttacgtgttatcggcggagattatcattacacgtgtagccatcattgcgcatcatgccgaattaattccatacttccgtgatggaggtgttcatgggtttgctcgttcaatgaccacatctggcgccattgacagagttggcaagtataagggaaagaatgtgtatgaggttcctactggttggaagttcttctgcaacttgtttgatgctaagcgtttatccatctgcggtgaagagtctttttgaaccggtagtgatcacattcgagagaaggatggcgtttggggaatcttgtgttggttgaacattcttgctggattgaacgcgcaaaaccccaagatcaagacgttgatcgatgttaagaaagatttttacaatatttatggccgtacattctacagtcgttatgattatgaagagttggaaaatgaagctgccggtaaggtgatggatagaatgcgtgccattgccgatgataagagcaaggttggagcctaacggtgtcataaatgtattgtccacagctaccagtagttcatgcttttcggctattttagaaacagctttgatatcagtaattttaaaacagggattcgatggtgtttcgatataaattaattttgtgtttgattgaatggcgtcctcgatttgttcgagcttggtagtatctacggttgtaaattcaatattaaaacgattcaaaatttgctcagtgaggcgaaaagtaccgccatatacatcatcgggtaagatgacatgatcaccagatttgaaagtcaaaagtactgctgaaatagcagcaatacctgatgcaaaagcaaaagcgaattttccctgttctaatcgtgctaacttctcttctaaaagttcacggttagggttgccacttcgtgcataatcatatttaacatcgccaccaagacttgtttgatggaatgttgaagaatcatagagcttaacttgatgctgtcagctccagcagaagcatcagcaatcatatcatcgctgaccataacactcactcggccaggatgcttgtcaaaaaatttctctaatcgctcctgtaaaatttcctgagcctgtatcggagtgtaacgcttgacatcagcctgagactgcaattggacctggagattctttaatacatcaaatagcagggaacccatttcacacatacgcggtccacccacataaaacacatcgtccgggctaccatacaattccatagccatttcgctaaatgaaggagtaccccgcaaggataacatctgggctgcgcggctatactcttcgcattgacgtctgattaggcgagttactgtggagtattgccctaattgattctgtgcgtcacgcaaaatgatacgaaactcttcctgcttgtctttgactttaaaaggcagtggcttaccgtcgaacaggttatcagggcgccaggtattttgtttgtcacaaatggggcatttaattttttgctggttgttcatcacggttttgctaattcatattgtttagatatgaagtatggctacaccagcaatgattttcaatatatctgccttatgattgatatgaaaatagagctcttgcagcccccaatctaaaactaattatcaacatgcacttcacgcaccagagccaaccaagcttgggccgcctcagagagataagaatttctacgccaggtcatcgccatattccattggaactcacttccattaagtaaaagagagcgaatttgtgtcgtatgcctttgagtggcaatcatccgtggcaaaaaagtaaccccaaggcctgctgcaacaagctccagcataaaatcaatctgactgctttgagccaccaccttaggttcgaaaccagcgtgacggcacgtcgttgatgagggtgctgctgttgttgttgaagctgtcgagcgcgcatcctcgagcagccggtccgtccacccttctccctcgccctcaccctcgccagcgctcccgctagcgccgagctcgctcgcccggcgcagatccggcgcgaagaggccgagcactcggccgccgtcgacctcgcgctggaagagggcgcggtcgaccgcctgcgccgtcgtcggcggtcgagaggggcgtttccggctttgtgcgccgggaagagcaggagacgagggaggcgagcggagaggagagggccggacgagcaacccccaagtcgtcatcctccggcccctccctgctggcttgctgctcgagcccgcagttgagctcggcgaggccgtcggaaccgacgtaaagcggcagagggcaagcaggccgtgccaggcgaagaagctgcgcgtgcgcagcagggcggggcagcgccggactcattcataaacgtacaaaatcatcgctccggacgcaggttgaaggataacaatgaataacaacaccacggcaccaacctatacgctgcgtggcttacagttgattggttggcgtgatatgcagcacgccctcgattatctgtttgctgacgggcagcttaagcagggaacgctggttgccattaatgctgaaaaaatgctgactattgaagataacgccgaggtcagggagttaattaacgctgccgaatttaaatatgcggatggcatcagcgttgtacgttcagtacgtaaaaagtacccgcaggcgcaggtttcccgcgttgccggtgccgatctctgggaagagctgatggcgcgcgcaggcaaagaagggacgccggtatttcttgtgggcggtaaacctgaagtgctggcgcaaactgaagctaaactgcgcaaccagtggaccatgatgttgaagaagtttatgtagataaacctcgaatggctatttccggctggtttcattaccctcagcctggcgaacctggttatgacgctaattactgcgacaataccgtttctactttgcagtctttaacaatgaaacaaatggacttagaacttccccggttttcatactacccagttgttaagccagaacctttatccaaacaggatactgatattttaagcaattatattaatccactttacctgacacctgatggcattgaaaaactatcaaaacgcttttttcaagattctgttattgttttagtagagtttttaaatcaggaatttgcaaacgctctccttaagcgaatcatcgatgctgaaaggcagcccactcctatgcattcttccgaagtgtcattcccttggaaaactgccattcctcctcataagcacaggtacctatatttttcacaagcacggtggcccggaagtacttcaagccgtagagttcactcctgccgatccggcggagaatgaaatccaggtcgaaaataaagccatcggcatcaattttatcgacacatatatccgcagcggcctttacccgccgccatcgctacccagcggattaggcaccgaagcagcaggcatcgtgagtaaagtcggcagtggtgtaaagcatattaaggcaggcgatcgtgtagtctatgcgcagtcggcgttaggcgcttacagctctgtgcataacattattgccgataaagcggcgattctgcctgcggcaatttcttttgagcaagctgcggcatccttcctgaaaggcttaacggtttattatctgctgcgcaaaacctatgaaattaaacccgatgaacagttcctgttccacgcagcggctggcggcgttggcttaattgcctgccagggaaagagccggcccgacgcttcagacgtcgagaatcttcatctcgcgccagcgctcgtagaggtcggcgacgcagagttggttcctgcggtcggtcggcaaaaagcagggaggtccgggtcgtaggtcaggtttagctccttcgtgcgtcgagagtcgcagcggaagaggggagacagtcgaggagggattggtgtggaggattaaataaaagagaggcgctgtgagaggacgtacgccggatcgcggctcctcaaatccctcaagtccagaatgtcaaactcgcggccgaatgccaaaaagtgcgcaaacagcgcgttccagtgggcctcgagcgagaggtggaggacgctcgcgaagtggacgtggtaaacgtgggcgaagacgcggaggagctgacggtagatgtgcttggcggtcgaggcgaagttggaggggtagtcgcggcctggcggagggtaaaaagggcagagggggggacgagctggggacgggagaaggagggggaagaggagacggccgaggagggagaaggcaagtggacagacgacgaggggctcttgcgagcgctcagtcggggcgaggccaagttgaccgctgcgctcgccgacggccgacctttgttcccctctatctctgccggcaacgccgatgaattcgacgacgacgacgacgacgactatcgagcgccgatcgacggcgacttcctcgacccctggttcgccttcgtccgcgagctctgcacgggcgccactgctggcagcagcaacgatggcagcggcgacggcagcagcggcacgggcgagacggccttcctcgtctggtcgacgctcgggctcgtctcgcggcttctccactgggcgctgctgaacacgtccatcctttcttcgcttaccacctttcggttcctcaatatcctagacagcttgaaatttttactggtacaccgattatgtttacagcagtgcataatattaatgatgatcgatttgaacgcgtaaatagctggaaagatgttgaacagtattttttagataatattgagaaataaaaatatatcacttgaagaatttcatgtagcaaataaaatcatatactggggccccaacaaagagaatttcgaaaagaaattctacaaacaatgcgagttggggtggggccccaacacagagaaattggaacgccaatttctacaggcaatgcgagttggggtgggccccaacataaagaattactttttctttagaaattagtatttcttatgcatgagttttactcatgtattcctatttttaagtacacattagttatagctaatgataaagaaccactacataataaatcattagtgtttttttatcatttctgtccgctgatgatgaagttccaacgtccagccccgtattttgccaatgcattgttggcagaagtttttgttcgttgttagtctagtagtttagtgtcgagtaaggaaagcactatttacttttgttagcgataaattactaaggttctagtctgacgtaagtattcaatttctgttgtctaaaaaatatcgccgccgtcagcagcagttgttagtatatcgaattgtgatattgcgatttaaaaatcagaaattttgtcaaacattttccattttgattcaaaagtttccttgtccaatttcgtggccttaagcttttcgttgaagtcgtttagcaacaaattgttatccgtccaataaccataattgtttttataaggcattttaaataatactcgtccttcgttgtctaaaccaatttctcttgtaggaattcctgtttcggtttcacactctacaaggggttaggtaacgcacgcgagtcggggatcgcatggtcaggcttttcttaactcgtgcccctccggccaccctctcaccaggcgcaggatgccaagtccagaaagtcatggttcgtgtgtttttggaaggggcagaagccagagggatggtgtgtgtgagtggtgggtcgaggcgagagaggggggacgtctaagaggggatatgagcggcgtgaaaaggggggaaggggttaagaaggtgagggtgaggggagagtgcgcaggccgtcgagcgacagaggcggctcgtccctcagcgcccgagagcgaaggagacatgccaatctcggggctctttactccttccccgcaaacagctcctcgacaaacgcccgcatccggagcttgaccgcgtcaaagtcgtcgagcgccggccgaacgtcgaggttaaagtttggcgagccgtccgggtcggacatatttcgttgaatatctttatgtgaaattcgagtgcaaggagaatcattccgttttaaagaatggaggacttgaaatgggttataaattgtaaagaatttcgttgaaggttcacgttgttttcgactttgctctctcatagcagaacggcaagtttttcctcttgatattatatatttttaaaaattagacgctcggtcttacaagttatttcaggcaatattaatatacaaggacaattatcacttcttatgcgcagtcatatatcacaaacaagaagtcttttgaacggaaactcgaaacaggagaaaagcaagcattatcagtatcggtaaggtaatcaataacaatacattacacgattaaaaagcgattatttcaaaataaatttccaataatgttcatttttttctttatgcttcgaaaatgcacttactttttaggcagagtatatttcgcctcaatcaagctcgcccggatcgcctcttcgagcccggcgtcggcatgccgcgagttgagcgtcgaccggcgcttgaccggcgacttattgcgctgcttgctcgacttgccgccgggggcgccttcggtcggagggggggagggggaggtgcgcgaggaggagggaggtcggggtgcgtgcttcgagcgcgaggtcgtggacgacggcgcgggtggaggggggccatgcgaggtcgaggacgcggtcgaagtgggcttgccggcccggacgcccttggaggccgccgttgccgaagaagatgttgctcccgcgttggcggccgtcgtcgagcttgaaccgccagcagcggcgcctgaggcagtgcctgctgatgggccagcaccgctggccgatgacccggccgaaggaccgccattcgtagccgacgaagcagccgcagcagtagcagcaaatatagcgagcttgtagatattcatcatccagttgctggtattgctggctaagttctttaagaacttgctgccaggcatattctgccgtgcaatgttcatgctgaaggagttcgcttgccgccgccagcagttccggatcatctaacagtgtatggtgaccagaaaagattgcggcaatatcgtcaagcccgctggcttctgctttcgctgttaacgtcatcagatctaataacgtgaagtcaatagcctggcgtaatcgatcttgttcttcttccacggtcagggttgattttgcctgtaccgtacataaaactggttgataataaaaggctttacccgaaacaggcggaacgggacgcagagtaggtggagcgacttcctccgtttcaccaaagttatcttcagccagctgacggaaagcgatcagtgcctcttcagcttctggccctttctgatgaacccgtcgaaagctcggaagatgaatttgtaccaaaagaaaaggtaatcgaattgagcgatggggaaggtatctctacgatggctaacaagtccaatgatcaacctacgaggagggcatctactcataattctggcccacctgcaaagaggaaacgtgagtcacttgtaattgatttaacaatatctgatgatgatgaaaatgtggcaacatccacgacggaatcgccatctaatgctacaaaggagaactctttgagtcgaaatgtacagtcacctaacatcgacactgccatatcgaacaggtcaacaaacgtcagacatcgtcacccggggttcaaagactacacggttgaaaactccccagcatcaagagagcgttctacaagtgaaagcgctcagtcctctgtccatatgggctctgctggctaaggcggactgttatccggtcgcatttgcgaacgccttcctgggtgtatgtcactcaatggcgcacaaactgggttcccagttccatattccgcacggtctggcaaacgccctgctgatttgtaacgttattcgctacaatgcgaacgacaacccgaccaagcagactgcattcagccagtatgaccgtccgcaggctcgccgtcgttatgctgaaattgccgaccacttgggtctgagcgcaccgggcgaccgtactgctgctaagatcgagaaactgctggcatggctggaaacgctgaaagctgaactgggtattccgaaatctatccgtgaagctggcgttcaggaagcagacttcctggcgaacgtggataaactgtctgaagatgcattcgatgaccagtgcaccggcgctaacccgcgttacccgctgatctccgagctgaaacagatcctgctggatacctacttcaatacactcgtgcggtaaatcgtatgggtaatcttttgtcgcaacaaatcatggctgaagtcctggaaatacgggatcgttttgaatggcgtggtttgggttttattccatccagcgcgttaaaaatcaaagagtctttttctgaatttgatgccgagcagcgttttgaattacctgatagtgcagcacaggaacataagcagtgtctttgtggagaggtattaagaggagtaaaaaagccaactgattgtaaattgtttgccaaggcttgcctgccagaaaatcctttaggctcctgtatggtttcatcggaaggagcttgcgctgctgtttatgcttatggacgggttaatgctttatgagtgaaatcctgataactaaaaaattaactgggccaaaaatgaattttaaagaaggtactatcaatttgacccatggcagtgggggccacttcagagagaggtttgcaccatttagtgtgggaaattgtcgataatagtatcgatgaagcattagctggttatgcaaatcaaattgaagttgttattgaaaaagataactggattaaagtaacggataacggacgtggtatcccagttgatattcaagaaaaaatgggacgtccagctgtcgaagttattttaactgttttacatgctggtggtaaatttggcggtggcggatacaaagtatctggtggtttacatggtgttggttcatcagttgtaaacgcattgtcacaagacttagaagtatatgtacacagaaatgagactatatatcatcaagcatataaaaaaggtgtacctcaatttgacttaaaagaagttggcacaactgataagacaggtactgtcattcgttttaaagcagatggagaaatcttcacagagacaactgcagtttgcttgtagttatattagatgcaaatcctgcctcatggtactccctttccaaaaaagtgcctgtttccaaggtactggcagatattacggtttttctaaacgcacacttagcttttcatcatgataatagagttgctgtgttagcttcacactcggacaaggttgaatacctatacccttcgattgcacctgagcaaaaagtcgcagaagtagatcctaccaaggaggcaaatacgtatcgaaagtttcgtgaggtagacgacttagttttatctggaatgaagcgactcatgagttcgactgataaagtttcaagaaaaacgatgatttccggagcactatctagagcccttgcatatatcaatcaagttcaaaataaaaatactcttcgttctcgaattctaattttctcattaactggtgatgttgctcttcagtatattcccttttgatacattaccaacgatatctcagggcttacttgctgctactcagccagttacaagtgtacttaatacgtctccacttccaaaaacccctgagaaagatcgatctttaaatgttactccttcctcttctactcctactccagcttctgttcttgctccaccttccagtgctagcttatcgtcttccaaggatgctaatagaagtgttccaggaagtccacgcagagagaaaaagaatcgtgttacgcttgacgacttcacatttttggctgtattagggaaaggcaattttggcaaggttatgttggctgaatataaagtgaataaaaagttttatgccatcaaagttctgaaaaaagaagccattttaaagaatgaggaactagagagtttaaaaactgaaaagcatgttttcgaagtcgcgaataaagaaaaacatccgttccaaaaaactgctgcataccccgcaggggatcgccggggtcagcgtcctgctgctggcgctggtgatcgtgtgcaccggcgttcatctggcgcccgtcgacccggaagcgatctccattctggcgcgctataaagcgcccagcgccgcgcactggtttggcaccgatcagcttgggcgcgatatcttcagccgggtgctggtcggcgcccgcaccaccattgtttattcactgcttgccaccgcgctggccatggtgttcggctcggtcatcggcaccgccagcgcttatctgggcggcaggatggacgaaggcatcatgcgcaccatagatgccgtcatgtcgatccccagcctgctgttcgccctgctgattgtcagcacgctggggcagagcagcctgaatgcggtgctggccatcaccatcgcctttgtaccgggcatggtacgcaatctgatgttaaaaacctacattttggcaaaaataagcatacaaagccccatcttttggtaatggacgctctctctaatctgtatgtttggaaaattttacagaagcgatctgaaatttcagtttcacttttgtttaccatccgtcgtgccaattatggtatttgtgattggattcctaattcttcaaatatgttttctatgattgtaaagaattctttatatattgtggatatatcaaatattcgttccaataatattagccctaaagtttatgcaaaagattttaatggattacaagctgccaaggttgatttacctgggccgattaactcatacaccatctcttctgaccgttccgttgttgcaatattagtgaattctcaaatttttttctattcatttccagtttctaatttattttctactaatccttcccaccggggtatcgccaaaggggatcacagcaagccagcgtcttgccaccggggaggagttgtcaaggatggtggtggcagaggacgcaggcaacgcacagagtagagcctcgcgacgggtggcgaaggcggcctggcagtgagcgcgctgagagacaatgacgggggccacgtccgggtcggggtcgtcggccggggagtgtagggcgagacaggaggcagggccgactcagtctcaggactactccgtgaacgactcatggatcccacctgtagggcgagacaggaggcagggccgactacagtgggggtgagctactgcctaggctaaagaggtgctagacttgggggggcgaacgtacctcagtctcaggactactccgtgaacgactgaggtttaggagggggagcgagcggtcgtctagctaagaggagggagcgaaaagagagaggaggaaagaggtcgtggcagtaatgatcaccggtattctgctgaatgttctttactggcttggcctgttcgttccggcttaaggaaggcacctatgaagacgtttcctctgcaaagcctgacgattattgaggcgcagcaaaagcagtttgcgctggtggatagcatttgtcgccatttccccggcagcgagtttcttactggcggtgatttaggcttaacgccaggactgaatcaaccgcgcgttacccagcgtgtggaacaggtgctggctgatgcatttcacgcacaggctgcggcgctggtgcagggcgcggggactggcgcgattcgcgccgggctggcggctttgctcaaaccggggcagcgtcttctggtgcatgacgcgcctgtttacccgacgacacgggttattattgagcagatggggctgacgcttattactgttgatttcaatgctcggcaatgtagttagcggtagcttcaccttcaaccgtggggttggtggcgaggatcacttcagtgattttttcctctgccagacgctgttccagacgatcaagcccgatatcatccggaccgatgccgtccagcggtgacagatgccccatcaacacaaaataacgacctgaaaactgccccgtctgctcaatggcgtagatgtccgccggactctccaccacgcagatttgaccgttttcctgacgacgcggattcgaacagatgttacagacttcctgttcggtgaaagtgcggcaatcggcgcagtggccgatttccgacatcgcccgggtgagcgcctgcgccagacgcatcccgccgctacgatcgcgctgaagcagcgtgaacgccatacgctgcgccgacttcgggccaacgcccggcagacagcgcagtgcttccaaagaccatacagggaaacatgcgaccacgatcagcggcagcaccgatagccaaagcgggagtaatggcggcaaacataccttgaaacacgcaaaacaagatgtcgggtacactggaagcaccggaagaaggtctacccaacgtttggcgaagaccgaaattggcgagggatccgatgtatggaccaccctcgtgagagaaagtaagcgaataaccccaaaagaaccactgaaaggcaacaatggcgacagacatcattgacaaaaacagcatagaaatggcacttctacgacgagccaagccggagtaaaagaaaccgacaccgggaatcatgataaacaccaaagcggtacttgtgagaatccaggcaacatcaccattattgtaaaattgattaagattgacggtcatggaatcaccgccattgacacccgaaggggtgggagtgcctgtcagtgcaggttgaaaccaatcacgtcaaattaccggcggtggtggacggctttgccagcgaagggatcatccagttctttttcgaagaaacgcaagacgagaatggctttaatatctacattctcgacgaaagcaaccgggttgaggtatatcaccactgcgaaggcagcaaagaggagctggtacgtgacgtcagtcgctcctactcgtcatcgcatgaccgttttacctacggctcaagcttcatcaacttcaacctgccgcagttctatcagattgtgaaggttgatggtcgtgaacaggtgattccgttccgcacaaaatctatcggtaacatgccgcctgccaatcaggatcacgatacgccgctattacagcaatatttttcgtgatgaacgtgccggaaagcgaggcttatccggcatgcaatcttagcggagtcgtcccttgcccccccatttggccgtgcacgcgccggaggcccttttcctcctcctgcctagacccctttttccccctttcaaggatcgtgtactgcgctttttccttttcattcgacagggcccgggctagtcttcgtctctgggaggggcaacaggggggggcaagttgtcagcgacacgtcctccaactagccaaacgagcgcaaggagcgccgcgagacccggacgatcgaggacccagcagggagaagaatgtacgcacggcagcggcttgcgcatataagcgtcgatcgccgtcgaaaaggccgcaaagccgccgccgccgaggacgaccgagcgcgggccgccaccggcttggaatgcgaggatgccgccggcgaggaggccgccgagggccgagttccacaggtcgttctttgcgcggtactagctcgcagaaggtcttcaaggagaacgagggggccagagaaaaagtctttatcgcttccaagtgcggtatgccagtgagtcgtacagtatcgcatcgcatcgctccgcagccaaatctcgactgacgtggtctgatgtccaccagttcggtcccgacggacctacgggcgcggtggacaactctgcccagcacatcaagtcgtacatccaagactcggtcgagcggcttggaaccactccagacttgtactatcttcatcgaattgagcctggtagggacctcgaagagtccatcggtgcgttgaacgaggtgagaaaggccggcaagtgcaagtatatcggtctctccgagtgttccgccgagacgctccgaaaggcttgcaacagtaagtagggccggcgcgtttccgcttgaattggttcgactgactgatcgtgcaccctcggtgtagtcgccgagcccagccagccatgcggcaaaagtagcaatggccccaatgagaagtaaaatgttcatacgttgaggagattgagtaagactgtctttaaggcctaatccataatgaggacacttagtgtctcttatattttcctcaattctcattctctggcgatagatattcacaataagagatggactcaaagacgctttttttaaggaggttattagtacccatggttctttatgacctttggagtgaactttattttttttacatgcacgttgctttttagtgtttaaagtcagtgtttttcgtcctttaggagctcctttatagacaacaaaatgcgcaggtacttttcctttttcggttaagagaccatggccaatataagtgggttttgaagtggccagttgaaaataacttgagcttaaacaccacgtagatgtgtctcccatggcgcagagggagggcggagagggagaaggcggtctgagatgagaggagagagagagagagagagagagagagaacgcgcgcaaggcaaggggaagaacgcacccagcggtcgtcgagcgtccggaggacgagcacaaactgcgagacgatgtagacggccgcgcacacgagcgggaacagcagatacgtcacaaagagcccgatcggtttctcgtagctgaaccctgcgacctccttgaacgtcgcgacggcaacgaagaaggcgacgccaaagatggcgaaggacgagaggcggaggaaccaaagcgagaggggcgtgccgtcctcggcaaactggaagccgacgaaaccgttgacgagcaggcaccagaaggcgctgacgatgaggccgacgtggatcgccgcgaaccactgggcgggcgggcgagggcgcggggcagggaccagaacgcccccggctgacatagtctcgttgtgccacaatcgtttcgttgcgaaaaaaataagtaacaggtcgccatgttactgaaccctaaaatgtttgaccagcacctgaattcttaaagcctgtaacacgcaggggtggcgcggcggtgctgtcgcggataatcagttggctggatatcagccgcgacccccgctggaccttgtgttgctgcaattgagccagcagcaatagcatggcctcgcggccaatatcgtagcgcggctgggaaacggtggttagcgccggaaagcagtggctggcctgcgcgatatcatcgaatccgaccagcgatagatcacgcggcacgtccagccccattttgcgcgcctgcgtcagcgcgcccagcgccatgacgtcgcagtggcagaaaacggcggtgggcggcgtgggatgcgacatcatttgatacaaatgagatgagaaagatttctgaacggttttatcatttcgatcgacaagcgccttttccaagcaatccactttctgctggcgctacggagtttttattacaaatcattaaaagcaagttgaaggaattaatcggaacatctatatttttggcggagtctaggtttaggaaactagaggctaacaatgcctttcatagaaaacctattatcaagaatagagacgttgttctgtcaggcaaatttttacgatttcaccgattcaatatacccggattttggaagtatttacccactagacaaaagatgaatgtttacaaaagaaacaaacgtctcaaatttcaaaattatatacacataatggaatctgatgaaagacaatcaaaaatgaaattaggacgagtcagagcacggaagacaaaaaataacgaaaacaccattgggagagagagagttgggggattgcgagggagtaggggtgtgaaggggcgtggtcgtcagagatgagtgtgtgtgtgaagcaaagagaggctggcgagagagagatctagaggaagtagggagagaagccgtgtaaggtaagggggtttggcctccctcgatgaagtgcgagatccggtgtgcgtgttgcgattccgatagatgtgaagtgcgagcgacagtcgatctagacgacgtggacgtctgccgaccagcattcgaagccgctcgaccgtttcgcgacggcggcggcggtcggcgggtggtgtgcggctggaggtccggccgcgggcgcgtggccgtttggcggcgtgctgcactcgtaggggctcgcgttggacgagcacggcgtgctcgcggccgaggcgccaaaatctagggacgcgcagggggagtaagggctgttagaccgcctttttaaaacagttgactcagggttaatgctatgtctgaaccactaattagaatttcacacagacaagccattatctttgcttgctttttagtcttatatgagtttctgacttatattgccaatgacatgatcatgcccggcatgattaatgttgtaaagtctttcaacgcgcccgaaagtattgttgccacttctctaactgtctatgtcttgggaggagccagtctgcaactcatacttggcccactatcagatgcttatggcagaagacctatgatgttaataggatcatgcttgttttttctgttcactcttttaatcgcaagctcgcactccatgaatcaatttttaatcgcccgatttttccaagggatggggttgtgcttcatcggtgtaataggttatgcaaccattcaagaaatatttgaggataataggatatctcaaccagcttttgtagactatatagccttggctgctccaaatcactagaagatgttatttcatcccaagaaacttcacataatgctttaaaaaatgatactatcgcagagccagaaagagaagacgtttgggtaaatattctatcaatgctcaacactacctcagtggacattagttctgaaactgcctctggggataaaggtttagatagtgagcgagttctagtcgaacgagaagtacttccactaacatgccgaattgagtttgaagaaccaatgttcacattctttcgacgaacacgtgcatttataacatcaggtacttctgtttcatcgacaccaacaccaatcagttgcacgcgttctagttgacttataatagtaaggatatctttccaagaatctttcaaattattaccttcggtagatgccgactacggcgctggacgtcacggtgcagttgcaggtactgcgtttgcttaaacataaagcccgcgccagtggaactgcggttctgttcatcagccatgatatggccgtggtgtcgcaactgtgcgatagcgtttacgtgatgtatgccggaagcgtaattgaaagcggcgtgacggcagacgttatccatcatccccggcatccgtataccattggtttgctgcaatgcgcaccagaacatggagtaccacgccagctattacccgccattccagggacggtaccaaacctcacccatttgcctgacggctgcgcttttcgcgatcgttgctatgcggcaggtgcacagtgtgaaaacgtcccggcgctgacagcgtgtggtgacaacaaccagcgctgtgcctgttggtatccgcagcaggaggttataagtgtctgacaccttaaatgcaggcggcgcgcccccgaccggggacgcgccgccttttttctgccgatcaggccgggggtcagagcttccgctcgacctcctcgcgctcgaagatctcgatgacgtcgcccttgcggatgtcgtcgtagttctcgaacgccatgccgcactcctggcccgactgcacttccttgacctcgtccttgaagcgcttgagcgtcttgagcgtgccctcgtggatcaccacgttgtcgcgcagcaggcgcacgcccgccgaacggcgcgccacgccctcggtgacgaggcagcccgcgacgttgccgacgccggtgacgcggaacacctcgcggatttccgcatagccgatgaagttttcgcgcacctcggccgacagcagacccgacgcggccgctttgatgtcgtccacgaggtcgtagatgatcgagtagtagcggtattgataaattgtaattttaaagtaaagtttgaccaagactagtacgaacgatagagcgggccaagtccaccgtagtcttggcctcctcttcattaccaagtagtggattaacctccataacatcaacagcaaccaatgtaccggattcagctacagcttcgcagatgtacattgcctcacggaaagtcaaaccgcctggaacacgggtaccagtggctggggcaacgatgggatcgcaagcgtcaacatcgaaagaaagatggacaggtcgtctcttaccaggattgatgtgctccatcgccatctcaacgacacggccaattccgtatttgtcgacgtggtgcatggtataagcggctatgttacgctcacgaagaaaagcgcgctccataggatctaaatcacgcaatccaataaaagccagacgacgctcttcaataagcgacgataaacgcgatcacccccagcgaaccgccgtactgcaagataatgccgatgatgatgcagctgaataccgtcgacaggcggctgaaggagtagcagaaaccgacggcgcgggcgcggatatgggtcgggaagatctcggattgatacgagtggtagctgtaggtcagccaggcgttggaccaggtgatgaagaaaccgcacaggatcagccacagtgggttgttctgcagtgcgaacagcgagccgaagatcaccgtcaccaggcaggacaacacgatctgccacttgttctccatcttgtcggcgtagaagctgcacagcagcgagccaagcgggtaggccagcgtgatgaagaaagcgtacagcaggctgtgggtgaccgaagcgcccttgcccgacagcagcaccggcaaccagttgccgaagccgaaaaagccgcgtcgcgaggccggcgtccgatgcaagacgacgaggtgagccgcggatgaggagcagccgctcgagcagcgcgttgtcgagcgtgagccagggcgagtcaaggtcgtccgttcgaagcgagcgctggaggtgccggaggttggccttttagggttactgcagcatcgaatagtgtaaggcaaggtcaaggagaggcgggacgggcacagagacgaacggggtagggtcgggtcggctgcttaggggtagagtgaacggaggagggaggtcgtcgagagggggaagacagaggcggagggactagctacggaagagggaagcgggcacacggaagcggagggtgaaggtagacggagcggaagagaggcggaacagagaggagccaatgaggagaagggaaaacgaaacagacgaaggcgggcggcgccgcggagcggaagcccctttggactcgggcaaaatcgcaagtatcggccttcgtatgtcatcattaaacgcaacaaattccaatttaacttcattacctaaattttccaataagtgtttggcaatacaagtcaaataaaatgctcttttatgaaaatatctgccgttcaaataatccttttgggtaaatatagactctgggatttctaaaaagagatcatatgaccaaccatcaggattcaaaaaaaatttgttcgaacaactgaaaatacccggtgttacagtttttggcggcacaaaagatgctcgtaaattagtgtctttggcaggtaaaggctcagccaaaggtacaattacttttttatctttttccaaatttttacaagccgaccaaaagattgtttctggtataactggagtcttgaaaatcaaatcctttattttttcgacaaatgtatgaggagattctgcgccaggcggctgtgggcgggccctttggcggcgctggaggggcaggtggtggcgcggggtacggagcgacgggcgtgagctcgcccgttggctttggcgtcatgcgcaacggccacggaccgcattcgcaggcttaccgctcgccgcccgtcggcggaggcgctggcgccggggggacctcgtatttcccggtgcttgacggatcggacgacgacggcgagggagggagcgacgtctcgtccctcgctttctcggacccgccttctcccgcctccacctcgcctccgtcaagcaccagcggcggcggcggcgggcggcggggccagccggcgccttcggcagcgccgccagacgacgaggcgctctatgccgaggcgcgggggtacctgcacggcgactgggcctacgtcgtcatcgacgtcagcaagggtatagtgggcaatagtcggttttattttgctaatcctgataaattcagtcgatttattaatcgatgggatttgctattgcttatattgactttttctgtgttatttttcctgggttgggccggttcacagatggctaccccgtatcaattaggggatcaaattcccatttccttggaaccttccaatcttcccttttatgcgttacgaacagttttacgcatgtttatcgcattgattttttcaattctgtttacttttattgtaggtgctttagctgccaaaaatcgcagggctgagcaaattgttataccggcgattgatattttacaatcgattcctgttctgagttttttatctcttactgtcaccgggtttatacatttatttcccaatagcttgttaggtccagaatgcgcttcaatttttgctatttttagcgctcgtcccagacaccgggcagatcgtccgttcgaagcgtgcgctggaggtgccgaagatcctgctggatgcagaaccgaagcagcagcaacgcatgctgagacttgaggtcgccgagtgaccgaagcaagccgacttgatggacgaccttggcctggaggaaggaccgcctgaatgctggactgccgacggccgtaccgagcagctcgagccctgagctgcggatgtcggccagcgagtgtgacttggacttggcgacgttgagctgaagggacgagccgcgaccgtcgaagaagtcctgaacctcggccaaggcttggtcgtccgatgagagaacgtagatgtcgtccaagtaggccaacagcagccggtccgggccgaggtgtcgaacgaggtcgtccagcgtccggcgaatggcgaccgagaagaagagcggaccaaacgtacttgttgttgagataatgatttacagcgtttgacatcgctaatttcattttcatcaaggcctaataaaatccaggtttcaattagcgataaaatcttggtggctttttccgaattcatatcggtgacgttttgggtaatagcaaccagccaaagacctaacttcctggctactttggcaaccagtaaacacacggccactaccgaaggaatttgaaattgcagatgggattcatcaataaaaagaaaggttggcctattgtcgttttgagtggcttctgccatagccagtattcttggcaacaaagacaccatgaccaaagccagttttccggtatcatctttaatggcagaaatatcaatatgaaagatatcaaaatcacctaaaggttctgttggtacattaaaaaagcgtgatctggcgctgttaatgacataactgcaaataactcttcctagtttattatttgcccattcatctatccagcggggaaattgtacttctcctgattgttcttcagaaatctccctttcaatcgccagctttttccatccttgtagcttttcgttgcattcaatttcatatttcattttgcgatctcgttcttcaatatacttttcaagtgcttctcttttgttttcttcaatttctaataaagtagaatctacagatctcttgtatcttttaatgaaaagctttaaatcttcagcagaatcatttggtggtgtcagattgtagtcattatcaaaattctcgttcgacgtcatctttattagttataaaaaagaaaatcaagtcgcaaaaagatacagtattcatttgtcagtgattcaacactatattatgctacactacgtaacgtatccgctgtgtgtcatgaattaagtggacacgttcctgctacaactcgaaatcagtattatcaaagtcgaaatgttttcttcgtgactcctcaaaccattttaaacgacatcaagcatggaatttgcgatcggactcgtatatcttgtttagtaattgatgaagcacatcgtagtactggaaattacgcttatgtggaagttgttcatctactttctcttagcaacaaaaatttccgtatactggctcttagtgctacccccggaaataagttagaagcaattcagaatgtaattgattctcttcatatatccaggattgagattagaactgaaaacagcattgatatatcgcaatacgttcagaagaaagaggtggatttttttcctgtagatttgtctgcagagattacagatataagagaccgattttcttctatattggaacctatgcttgaatatatcatggaagaaaaatataaccggagtagtgtatggccaatctctacgacttgaaaaagttcgacttaaatcttcttgtcatatttgagtgtatttaccagcatttaagcattagcaaagctgctgaatcactatatatcaccccatcagccgtgagccagtcgttacaacgcttacgtgcgcaatttaatgaccctttattcattcgctcaggaaaaggtatcgcgccgacgacaacagggttaaatctgcatcaccatcttgagaaaaatctcagaggccttgaacaaacaattaatatagtcaataagtccgaactaaagaaaaactttattatctacggccctcagctcatttcttgctctaataatagtatgctgatccgctgcctacggcaagattcctctgtcgagattgagtgccatgatatccataatagaaaaggtggcgcaacttgcccataaatacggtggggtattgtggggcgagcacggtaaaggatttcgaagtgaattcgtgcctgtattttttggagaggaactctacaatgagctcaggaaaattaaatcaagctgtgatcctttcaaccaattaaatcctggaaaaattgctgtccccataggtagccatgactcacttgcaagcatccgttcggaaaaaaccagagcagatgtagacaatcaaattaactaccagtacagagattcttatcaattacctttaaactgcaatggaaatggagcgtgtttcgattataaattacaagatgtgatgtgcccttcttataaaataagcagggatagaattcattctcctaaaggaagagccagcttggttagggaatggttaaggcaattaagtgctttggcatatattatgtttgtttggtaagaaattgacacattgtattataagtgtattaaaatgtgtgataaatgtattatttatcaataaaacctgtattatatgtgttttataaattgttctatgtaatatgtattaaaattgtattataaatgtattaaaagtgatcaagtgaaaagaaaatgttattgttataaatggtaaatattttcttaatacaatatatttatgtaagtttccctttaaagaatcgaataaaaattaaggactaagcatcaaagaacaactctctcactcacaaaagaattcacatgtatgcacaaagaaccatatgcttgcccattatgtacatcttcactaattaagtatccttcaatagaatgaaataggactttaacgggttgtaatgttggttaggggacaggtaggaaactatataatgggtaaggtttgaaatcccatcaacagaatttaatgacttatagaaggtgtgaaggccatcatatatctttgatgatagttgtgaagccaattcttccccgacaagtggagataaataaagcacacctaattgcgaagtccatttgtctttgtcaaaattatttgacttatacaatgctgctaaggcatcgcagacataatctatgatactgttggccaactcatgtggtacactagtgtttttaaggacggcctcccgtaattctttacaagcgctatctaacgcctgtttctcagaattgtttgcagcctttgcagcctgagcagctgcagccttgtttagagtagtaagtgcatgagaagcaagggcacgaacttcaggcatagcagcagtttgagcaatacgctcaacgtccggaattagctcaggaagaaaatcatttcggaccggtaggccatcaggcgcttgagctcggcgagggccttttcgatctcggggacggtacgcgagcagtagatgagcttgcggtgcgaggggtagaactgcgccgggggaggaggatgtgatcgggggatcgacgagggggcgagggccgagcaggcaagacgccggcgggcgcgcacacaagacgagaacgggagggacgaatgacagagaagtcctagctgtcagccctccgagctggcgtgagtgtgtctcgagattcaggcgccctccaggccgtccggccggccgaccgtcaattaggaaggcagacggacctgttggtacgagacgatgagcgaaaggagcgagaccgtcttgcccgtcccggagggcatctctgcgcgtgtcatgccatgccgagccaggcgagggagggagggaaagcagagccacttaactcaactggcctgtgaatctcaaagaaattatgatattcaagaggcaatgagtgatgaacaagagagagtcaatgaaaactctttaatgattaattacaggagcgagttgcttaccctggaaaatacattgaagcaactggatacaaaatgctttcaacaacaacgccaatacaatcaagtgagcaggcaatttaatgaacttaaagtcaatctgacccacattaatcaaagtattgatagaatccgatatgaacgtcaattgcttgaccaacagctaaatcacccttactcggatggtaatgtgcatactaatcctcctactcacacacgtatttatcccgatctttcactaccccaggctcctcttacgcgagatcgactgctgcaagaagaaaatagattgattgaggagcgccagcggctgatgtctgaatcctgacctatgagtcgataagggttcccccattgcgcaagccatgccctcgcgtgttccggtttgtccttgtaatttaaaccatagataggtacaccttctcttgcgagttgcaacataaacacttgctcttcaacgcaagcctcacaccaacttgcccaaacattaagcaaggcgacctgattatgaaagctcattgcactaaaagtagaatcgggattttgcaactctggtaaggcaaagtctggtaatggctttccaattcgagctgaaggcaaatgatgaggatccaaagataaacctcgccagaggaaaaaacataaaagacaaaaaatcgcgataggaataacacgccatcctatttttttcatatcttgatctcctgccctgacatcaccgttacgtgccttattcggtaataccttctatcgtccagggtggcacataagctggttaaaacaagtcctttttatgaaacgcgaagtgaaagggccgaggcaaatttgaaattattactgaacgcttttgaaaacaaagactggacgagtatataccaaatttgctggcatgaatttctcgacatgcatcaattatttaaaacctgtgaaaaaccattttcttacataacagataataccttacatatattgagcgttattgaaaaattttggaacgaaaaaggcgatggccctgtagttactatggatgccggtcctaatgttcatttgctttatagatcagatcaaatagatctcgcacgacaatttaaatcggattatttggtaggaaactatgatgttttatgattttgaaaccactactttcggcaagtggattttagcaggtgaacatgcggtagtaagggccctaacattttcttatcacccaataaatgcggagaatccataccagaataagctaatacagatcctttaggtgttgaaactgtccagcgttgagcatagatgactgagtttgcgatcccgcctaaagggataactttcaaaaaaccatcaggtgttatggattccaccataaaccccgtttcatcaaggtgtgccatgaagagtaatttcggtcctttctgattatctctacgctggccgatcaaattacccataccatcgatctttagctcctccatatagggttgccactgtttttgcaccaaatgacgaacatttttttcgtgcccagaggcaccaggtacctccgtcaattgggccaaaaatgacatttcagctgctgaagctaaaaaggaaacaatcaatccgctaacaagaattgcatgctttatcatctattatgcgctcttgggctaatttccatcgttgcaatttatccgcgtcagacggtgaattttttctattcgacagcagttcagattacagactacatccacttctacggttatcgcccggttaaatctttcgctattcgcattcctgccagttacaccattcacggaatagatgtttcgcgctggcaggagcggatcgactggcagcgtgtggcaaaaatgcgcgataacggtattcgcttacaatttgcctttattaaggcgacggaaggcgaaaagctggtggacccctatttttcgcgtaactggcaactaagccgcgaaaatggcttgctgcgcggggcatatcattatttctccccgtcggtagcagcaccggttcaggtgcgattatttctgcaaacggtagatttctcacaaggcgatttccctgcgttatttatcaattacaacattataagccaactgaatttttcggcaaaaacagtcaaaattttagatgctgcaatgatggtagttactacgtactacattattcgttcagcaaattatgttttccaccatttggtaataatgtacatgaataaaaagaatgaaccgcctcaacggataacgcaggctgatggaatggtgatggtggcaaaagtggttgtgtgggcaatgggcattattatgctggctgacaatttgggttatgatgtgacaacaataattgcagggctgggagttggaggtattgctattgcactggctgcccaatcaatactgggcgatcttttcagctatattgttatcttttttgataaaccatttgaaattggcgactttattataatgggaaccagcgttggagttgtagaaaaaataggtcaagttagaggaagcatcctttgcttgttccaaaaaagaggattgctcctcaagacttttagaaagtggatggttatgctctacgggctccataactatgatattgttagcaacgacgaataaataaaagataagagaaaaggttgaaaaatcttaaaagaacatacattgacctcttaaacgaggaacagatttggatttttttaagttgttaatattcgagtaaatatcaaggctatttgcgtttacgaggttacaagaggaagagctgggagttgcaggatttggccccgaatagtaagagtaagaagcgactgaagacgtttccgaagcagagtaggagtagtattcagggaatgaattacacgaaaaattccacaaacagtcgtaagaatgagagttggtagaagcagaacactcgacaggtgtagaagttcttctctactttaccccgatcgatgcataacgcggcaactttgtagtaccagcgtgatgacgttcgcgtttgccgtgcgtgtaatgtagtacaaacttatattgttgtactacaatttagatcacaaaaagaacaatgcataaaaaaatgacatgcgtcgggcagaaatctgaaaagggatatcaggcgctaaacaggagggaaagaagagtatgctttcaacggcttagctactcgtttaaaggattaatcatgaagttgaattttaagggattttttaaggctgccggtttattcccactggcgctgatgctttcaggctgtatctcgtatgccgtcttctgcttgaaaaaaataaaagcattcggatggggtccagcaggaaaaccactttgcataggattctctctacatcaaactcaagcgttttagttcatggacaagctcctgttgcgcggctttcgctttgcggcgtaaccacaatcctttcaggacgataatgaatgaaatgttcagcgcgaggccaatcgccagcaccagataaaacgaacccaccggcgacatcaggccgatcagcgggtcaaagatacccaaaccaggtgccagacgtttgattccgaaagcgatcaccagcacgccggtaatgccgcccgccagcgtattggcggtaatcatcggcaacggagctgccagagcgtaaggaatagccggttcggttgcgactgtggcaccgaccacaatggcactactggcagcctctttttcctgtcgggtaaacagtttgggcgcaatgaacgtcgcaagacccgccgcgacgggcggcatcagcgcgacaacgccgacgatggcgtaccagtcataaatgtgtcaggccaatataacgcaaggtcgtacagtgaagacttggaaagtaatacagtatcagttgtgcaagcaatccatccctcttctaagtcattatctagtaatgtgctagtattagccaaaccaacagagtagtatgggtgcaaatcggaaagtaatattggtatagaagcatcagatgatcttttgatagagcttagtcgaacaatcatatcgataattgaatacagttggtcatcatgagaagatatcaaaagaagccgcttgcgttgaagtgcaaatttataaagacaaaaaaaagccggtccaaggtgatcgagcagaagtgttgcgtaagattgagagagttcctttgaattggcacctaagatagcaaatttgttcccttgaagtttctcaaaaagagaatcaaattcaagattcacagctgatgttgcatttaattattgaaatgattgattacattgaaccatccttggtggtaatgggaagtcgtggtcgaagtcatctcaaaggtgtattgcttggttcttttagtaattatctcgtaaataagtcgagtgttccggtgatggtagctcgcaaaaaactcaaaaaaaataagcaacgactgggaaaccaatctcgtttagctaataacttatccgatgcgattgttgacgaagtgggtcgcacaccataatgcttgtttgctgttgaaccgtattacttttcattaaaagtggctagttggctctgataagtggataagggattgaaaactgcattttataaatgtttctttctgttgacgtgtcgtgtaagtaaaacacagtctccttttaacatttcttgtggtgtctcaaatgtcgaataaattatttactttatatggttcgtggtattgcacatcggccaccagagccaacgactcggatgatgggtaagtaaccgatgtaacaactgtaacgtcattcatcaagcatatccttatgctgtagtcgtgtttatggccataactgcggtatatgttttgcccacatacagcgagtcttcctggacacaaataatggcgattggcttgttctcgttatccagaacaaccagagtgttgaatgggtagtttttcccttcctgcaactggctttgatcaaggtccattcggacagtaattatcccgcctgagtaggttgggacgaggttgatggtgcaaaattgactggtcagttctgccagttcgaaagcctttggcagttctccaatctcataagtgccatctcctttcttagtaaccagcgaactggtaccgaaaacggccttgcctgcgcatccgtcctatatctggataccgctccgacatgtcctccccccacaagggcatgtgtgtttcgaggtctacagcttgtatatgtgtgcctgatgagtagacgagcggcccctcgcgagtgatcatgcataccgcatcgaccgtcttcgagttgattgtcaatttcaagctacctactagacccggcggggatgtcccgttcgtctgccatacaccacaaacgccttgcttattgaccgtaatgaatctttcgaatcgatcttctcgccacggagttcctgcttcttcactaagccctagaaagacctgctttgagttccgacatccctctatcttcagttcgatccgcttcagatgcgtctgttgattactggtgtccgtttcggcgaccaatgtgcaggaatttcttacatcgaccgcgatcaactggcaaattgtttgtcgatatgttgtctccattgaagcgaatgatggctcgccggaagttagataagttcaagcgtttacaagctcgtaagccatgaatggtttaaccgtcgtttttgctggaactccagaatttggcttaccctgtctggatgctttaattcaatcaaggcatcatctcaaggctgtttatactcagcccgacaggccggctggccgaggccgtaaattacaggagtctcctgtaaaagaatgggcaatacataaccaggtaccagtttatcaacctcttaattttaaaaatcaagaagctatcgatgagctttctgccttaaagcctgatgtaatggtcgtgatagcctatggattaatattaccaaaagcggtgttggaaattcctcgtctgggttgtattaacgtgcatgcttctctgtttagagttattcctttcattatcttctcggcggcgaaatcttcgctcgtcgattaaacgacccacgtctttattaatccaagattcaatttcctgcagggcaaccgttagatctttcctgttatgcgatactatgtggagatagagtggaggatccttgtcagtagctaaagctttatttggataatatcgtcctttggaaaataattgcacgccacttttattctcgatctcagaaagggttgaggcacgcaccaaaatgtagcgattacgcacattgttgatttcaacatcctgcataaagacaccgtccccttctataaccttgctagtaatatcggccatagacggaggaatatcaactgcgggtccctcagaacttggaggaagtggaggagcaggtgcacttggaggtgacgcagatgtcgttgaggagccaagagtcggctagcatttctccggaagatattgacattgtaaattaaaatttactttgtttagcgcctttaaatagtaaactttatacctattttaacaaagtgacatagaagtgtgcaggtgacaaaattatactcaattgaaagagatatatcattattaaaaattactttgtttgtttgtgcttatgtacatataattaatgtattaaaaaaatttcagcttaagcgaatactttcgtcattctgtaccaaaaatatatagcaattctcgaccattattcattatgtctattgtagtgcattaatcataaactcttttactgcccgctcgcattcatcaaccacagagtttctattccattcggacttcgtattccaaatgatctgatacaaaaatgaatgaagatgtaaaagctggtcaacgggtataaagagagaagaaagtaggaaagtaatgagagtaagagcagtaatagtaacataggtattgctggatacaatgggatacaatgggtagaatgttgatattgtagatgtaactaactatatgtgtaagtgtagcttgtcgcatagcaagtatagtaagcaggctgacagaaacacagacagataaatacacaaatagacaaaaaagactatccatctacatcgtttccaacttcaacttctgcaactgcaactcccacttcgatttcaatatcattttcataatcgttttcttgcatcgcctttgcctttccccaatctccctctctctttaccctcctcctctaccatctttttcgtcgcaaaaatccttactcacacactctccctccatctctttatttctccctccgcctctttatttctatcagttttccagtaatatacgatcatggatcattaatttttgagggcaacatgttcagtggaagtatagtagccttggtaacccccatgcgaaatgatagcgtcgatgttcatcatttgcgagaactggttgaatttcatatagctaagggaactcatgccttggtcgcagctggcacgactggtgaggctggtactctgtcacatagcgaaaaacttctggccatcaaaacagtcattgaacaagcaaaagaaagagtgcctgtgattgcaggtactgctatgaatgcgactaaggattgtattgaactaacccagcaagctatggaatatggggcgcatgctgctttaatcatgacgccagcctatatcaagcctactcaagaaggtttgtatttgcactacagtcatattgcccaatccgtagcgataccgctcgaccaacgatcgacgtcgacctcggcccgcccgcagggcgacaagggctccgccagcaccctggatgtgctgcgaaggagccagccggcgcaggtggtgatgggcaaagttgtagggggttggcgaagctcccccggaaacatcgctcaggagccgccgaggatggccagccgagcgacaacgaggcggccggccgagacggcgacgaagcagacgacgcaccgaatggaggccaccacgatatcgtccctgagcctgctctgagaacggagcagccgtgagtcgagtctagtggcggtcccagcccgagcgaggccgcaggcgagccgacgagccgagaggaaacggacgacgcaccggaccacgacgcgcctggggagccgtacgatggcgagctgctcgtcctagagcctgctgatgcgcaaggtagggaagagtgaggggaggagggtgtgaagcgaccgtctacttcttggcggcccgcttgtcggcgagctccttctggtaggcggcctccatctcacgctgctgattggccatgacgggctgatggcgctgtgtgagagcaaagttccggtccgcaagggggtcagcctacgagaacctcacaatagacgacgccccccccgccatcagcccgacgcaaaaagcggccgcctgaccttgtactccatcgagaactcgcccttgccctgcgtcatgccgcgcaaggcgcccgagtagccaaacatgtcgttgagcgagacgtcgacctgggcgacaaactcttcgtcgcgcgtttccgagtcgttgatcgagccccggcgctggttcaagttgccgatgacgttgccttacgacgagacattaggggtgaggacctcaacctccgcctcgtctggcgcagcagcgcccgcctcgcaccctgccgaacggaccgtcgactcgacggtcccgctccagatctcagacacgcccatgatccggcggaaccgggcgatgcgctcgcaggctgcgctcggccatggctcctcctcttcctcctcctcttccacctcggccggcgcctcaaaggacagcaaagcaggcggaggcggaggccggaaatcgtcgtttggtaaacgcggcctccgggcaagcgcctcgttcggcgaaggccggctctctgcgccccacgcgtcgatcccgtcggccgaattccacaggcacgtcgaccgggcgctgccggaggcggtcaggatgcggcatttggtcgtctttctcggcaagaggttgatgggttccgctggtggggcgcagagagccggcctatccgtataaccgctgctgctggcacggaaattggcaagaattacataaaattaagaatcaagttttcttaatttaaggagctataactaaaagtttcactcttctagatgactagttcaatctttcgatcattgactaatattctccactgctggatgaactaaatgttcatcttggctgttgtctcagagccaatgtgatcagagcaccacttagtgtcatgattacgatttgagcttgttaagcttttacctctccaactactttaatcgtaagaagccagtcttaaatcaaagttttcacttctttcacaacactccaaaagagtgtgtttattcggaatttagccgaaatttaaggtccgttcttcccttttactcacctgttcaccacgtcacaatacaaaacaaacagcacatcctttagggtcccgaaggggctgacataagtcggtgaatgagccactggttactattatgcagtaactgtgccaataaagaaaatagtttggtaacgtactgattatacgttgctttgagggatttatggcttcttcgctatttgaatgtaaatcagccactgtgtcgctaaaaagagacaacttaagataaacttattagattgcaataaaatcaatcatttaagtgtcgccagaaagcgacacggtaaaccacccattgtcgtgatttacagacacaaaaaagctcccggagttgggagcttatgatagtggttggtgcttaatgccgcatccgggctgcaaaaccaatgaactgatgacttaccccaactgcttacgcgcattgcggaaaatgcgcatccatgggccatcctcgccccagttttccggatgccatcatcgcgcatcaatatatgaaaaaatcgagcatatagctgatgcatcactgcatgttcaattccaccgatgtattggtctactggtgtccaatacatcggtggaattgaacatgcagtgatgcatctgctatatgctcgattttttcataaattgatgcgcgatgaagggttagttaattcggatgaaccctttaaggctttattaactcaaggtatggttttaaaagacgggcataaaatgtcaaaatcattaggtaatgtggttgatccaaaccatcttatcaatacctacggggctgataccgctcgcttatttgtcatgtttgcatcccctcccgagcaatcactggaatggtcagattctggagtcgaaggagcacaccgctttttgaaacgagtttgggcgttttcacatcagcatagagacctttcgagaagggaaaccagcccagctactcggactgcgccgaaagaggaccaggcccggcctgcatgcccagactacattcctgcgcgcccgcccgagagccttcttcacacggccggcagcttccgcctgcacacagcgcccagctcaacggcgccagacgcccgagagtgcccggatcgagccacgactgccgaggacagggctcgccccgcttccttgagcagcaacgagggatgccgcgagttgtggcttgctgccggccgggatggaaggactgcgaggtacggtgccctctcctctgcggcctcccccgctcgacctccagaagcaaccaagggggccgaagagcaatcggcaagaagcaggggggggggggggaaaggaaaaaggcaccttggagatttttggggaaggcggccgggctggcaccagctatggctatcgtgacgcctgggcgattggggttaacgctcgctatgtcattgggatctggactggcagaccggacggcacgcccgttgttggtcagtttggctttgccagtgccgtaccattgttgaatcaggtcaataatatcttactgtcgcgcagtgcgaatctgccggaagacccgcgcccgaactcagtcactcgtggcgttatctgctggccgggcggacagtctttgccggaaggtgacggtaactgtcgccgccgcctggcaacctggctgctggacgggagtcagccgccaactctattactgccggagcaggaaggcattaatggcattcgtttccccatctggctggatgaaaatggcaaacgtgttgccgctgattgcccgcaagcgcgacaagaaatgataaatggaatttaacctttgagacaaccactggatcaagccaagatttgatgatggaccaaacgccttggaaaagccaaggcgctttgtgtacaatacattcacccagacattcgggatagtgtgcttcaaaacacttgatcatgaattttaatggcccatagtccatattggacatactgaaatcagtcatatcaaaaacaacagtagcagtttcaataggaggtttgagaattaaacgagcagtttccatgacccaaactgtgagtcgctcaaccgattcgggtgagacatcaccaactttatgaagacgtgcgcgaatataacaaactggacgattgtgtttatcttcaccgaatataaaacactttccgattcttagttgacgcacaaaatcatcatctttatcaaggtggtcagcgttacatataattcttctcttgacatacatttgaaagcacaactacgaagagtactaatgtcgaaggatatacagcatctcataaaaccgtggctactacctccaaaaaaaaactatgcctttacaaatgccaatatagtcgacgttgtaacaggggaaataataaaaagtgctactatttataccaacgatggaattataagtcaaattgataccaccaaaggagcagtgaaagagggtttcaatgtcgtggatcttgagggacaattcgtatgtcctggattgattgacgcacacgttcacattgttgctgttccaggagaagctgatatgaagtctgccttacgactctcattttcgcgtgctgtcttacgctttcacaaggtttgtaaccaaatgctagaaagaggattcactactgttagggattgtggtggagcgtcagacaccgaatcggcctgcgcctcctccccctcctcctcctcctcctcctctccctcgccggcccccaaagcaaacacgaccgtcatcccctgggcgcagttcgtccccccctcctcggactcgacctcgaccaccggcgggcggacagaatcgatcggccaggcaggcgacgaggcggctgcttccaagtcggccggcgctggtggctcaacgtcagggaagggaacgagtggggccggccggcgctggacgggcgccgccacaaagggcaacgtcgcggtcgtaggactcgtcatggctggcttggccgtcctctagaccgcagacaatggacgttccagtcttccccccagcacacttgcgcgcgctcgcacactcttctcgctcggcaccctccggcccagtatccactcgtttcacccccgcccgcccatccagttgggctcgcccgggtcgctgacaggaccgtcgacctcgcccggtgccagctcgtcgctgacagtcaaccgcattgatcagctgcctcgcccggccgtggcctgattgcgcatcgcctcgctttcttgacgagagcagagcttctgggcccttgcgcagcgcatcccatggccggctcacgcgtcggaacgccacaagagcgtgcgcccggctccccttcatcacttcaaacgaacgagggtccacgcgtccatgacggggacaatggcctgttcgctcaccttgctcgctgcttgctttttcgcctcgacaccgccttttcacagcttttcacgcccgccagaccggagggccgtcctcgctcgctgaccctcacccatgaccctctcccatctgctctttcttgcccgtagggcggagcgtgcgagctgaggggggtgggatgcgacggcgagatctttttttgttggcacgctcgactcggctcggctctggcgaagggatagagatatagagagggcatgtcgatccgagtgccgacgctacgggtagtcctcgactgacccttgaagctcgccgcccgccgcccgcttgacgtcgaccctcagccgtttcctctccttccgcctcctctcctcgcgcgccttccgctcctcgcgcgtcagaccctcgccctcgccctcgtcgccagcgagcgggccgaggtacaagtcgccgacgaattccgtcagtcctcgctcggaaacctcaacctcggcccgcgggccccatgcccaaacgacgtcttcctcccctccgtcctcgccttctttccccctccctctccctcccccgtattagacttatgcctatgatcgtgtccaattaccacacccagctttgcagctgatggtacggtttgaagcaaatactccgcgaagccttgtgaggcttgaatcacggtcaaacagttcatgcgagcgaagccagcaccaatttcagctctcaaacctttgtaaacattagtaaatgaataaacgaacttgaaaatgttaaaacattaagatgtatagagagaacaatcgcaagctgaaaatctaattacactcaaaccaatttcgtacaagcacgttatataacattccaagcaaaaaagaccaaaacagatagaaaaggaagaagaagaacgaaaaactctttctgaaatatgaccaatatgatcatcacaataaattagtatacgcagtaaggaaagtgaccgatgatcaagtatatcacactaccaggaagacccttgtctctagcgaaagcaaaaatttctctagaagaagccaggcataacgcagagcaattaaaacaaagagctattatcaaaacagctgacacgccaactgcaccccttttgccaagattattataaagcacctgagaaagtggttctccgtagggagtgtttagaatagaactaaagtcgtgacccattgtgcctgctatagtgatcataatgcaaaatcccataaaaagagataccgtaagacttgaaataattgcaatgggtgctgctttgctagcatttttggcctcttcaacaatagtagcacacgattcaaagcctgacaaaacccaaacgggggttgtgaagcaaaggatgaaggaccaacccatgttagtacatccagaataattttcgaaatttccaaaagttgcgaagaaatatggattccacggtcatcatcccttccgaagatgaagacttgcagttaccatcgaatacatattctaacagcaatgtggaatacggcccttttgatagtactacgtttgatagacaattatcaattgaagttaatcaaccagtgggtgctatgtctttatctccttgtggtagagatatagctttagcttcccgttatggtttactagtcttagatcttgataatccttataatccaccaagaatgctaagacattctactccttgggaagttgctgatactcagtggaatgttcatgccgcaagagaccaatgggtggtttctacatcaagtcaaaaaacgatagtatggaaccttgcactaccaaatgatcgtgctatagaatttatgttacatggacacacccgcgcatctcttccagtgcacagctggcggcggaaggaacggaggtcggcgctttaccttcaccgattgcaccgagaattttcagctcttgcccttcgtgtacccggttacgttcgataatttccagttggtcgatctgtaactgttcagccagttccgctaatgccatggtgatagcgaagttacctttcggtgcgccataaccctgataagcaccatttgggcaaatgttgctgtagtaggtggtgacctggaaatcgacgttatcgcacggatataacggcagcgacagcgccggtccgttacacggtacggtgagtgagtggttgccgtaagggccagtgttggcgcggaaatccatcttcactgccgtcaggcgaccatcttttttcgctcccagtttgacggtgactttcgcgacgtgacgggaaacactgattccccacgttcaggtcattgccaacgaacccgatctggtgagctttctgaccaaacttgactggggcgttaaagttctcgcctctcttgatgcctgtcgccgcgtggcatttgaaaacattgaagatgcagcccgtcacggcctgcactatgtcgagctgcgtttttcaccaggctacatggcaatggcacatcagctgcctgtagcgggtgttgtcgaagcggtgatcgatggcgtacgtgaaggttgccgcacctttggtgtgcaggcgaagcttatcggcattatgagccggaccttcggcgaagccgcctgtcagcaagagctggaggcctttttagcccaccgtgaccagattaccgcacttgatttagccggtgatgaacttggtttcccgggaagtctgttcgaatggccatagctgggtatgttatgggcgccacggttggttacaactacataagaggagaattctggctgccatttgagcgtactgaggctgcaataaaagaagcatacgatgctggcttgctaggtaaaaatatattaggctccggcgttgattttgatttatataatcatttaggagcgggagcttacatttgcggtgaagaaactgcattgcttaactcgattgaaggaaaaaagggaatgcctcgttttaaaccaccattcccggcaaattatggcttgtatggtaaaccgacaaccataaataacacggaaacatttgcgtctgttccggttattatggaaaaaggcggagaatggtttttaaaattgggtaaaccgaacaatggcggtgcgaaatgctttagtgttagcggccaggttttggaccgttcgatagtcaagtacatcgtggtcgccgaatgtcagcttcaagagcatatttacatccagctatgaagcgtaaaaacttaaccgttgaaacacgtgcctttgttactgaaattcattatgaaggtagaagagcaactggtgttacgtataagaaaaatggcaaactacatacgatcgatgctaatgaagtcattttgtctggtggggcattcaatacgccacaattactacatttatctggtatcggtgattcagagttcctaaaatcaaaaggcattgagccacgtgttcatttacctggtgtgggtgaaaactttgaagatcacttagaggtatacattcaacataaatgtaaggaacctgtatcattacagccaagcttagatatcaagcgcatgccatttattcttcaagaacaacttgcctatgccgaaatggcattgagactcatgggactgactgataactttgccaaacttgttattttatgtggtcatggcagctctactcaaaataatccttatgcttcagccctggattgcggcgcttgtggaggtaatcaaggtggaaaaaatgcacaattactggcgtctatcctcaataaaataacagtgagaagggctctggcagaaaatggaatcaatattcctcaagacactgtgttctgtggcgcgcaacatgacacgacgacggatgaggttgaaatttatcattcaaatgtcagtcaattcattgaccaagatatcctcgaccagcttagagctgacttaaacatggctaagcacaataataaattagaacgaattaactatttgaattccatagattatcgaaaaacggcttttacagagcggcgaagattatattgcgatgcttgaggaagctcttgcgggttacggacgttatctggatctgctgcaagcgcgtgccgagccggatttaatcattcaggcgttcaatgagtaccagcttttgtgcgccctgcgggaagggccgtttggcgtggctggactgaatgagcgaattgagcagtttatgcaacagaagcgcaaaattcatcgtcatccgcactctcgttggtacgaaggtcgaccggtgatgattgcccgtaatgacagcgcgcttgggttgtttaatggcgatatcggtattgcgctggatcgcgggcaggggacgcgcgtctggtttgcgatgccggacggcaatattaagtctgtgcaaccgagtcgcttgccagagcacgaaacccaaggtcatcaagaagtacgaggcccataagatcgacattctcacctttaatcaatcccgttatcctcgtgttcataaggagactttactacccgttcctcacactgccgactcggctattgacgagtggtatcctcctggtcatggtgatgtgtttgaggccctcactaacagcggcatcatcgacacccttattgctcagggtaaggagtatttgtttgtcagcaacattgacaacttgggtgccgttgtcgacttgaacatcttgaaccatatggttgagaccaatgccgaatatcttatggagttgaccaacaagaccaaggccgatgttaagggtggtactttgattgattatgatggtaacgttcgtcttcttgagattgctcaagttcctcctcaacacgtggaggaatttggctttttttttttcaagcagaagacggcatacgagataatggtttccagcatcgaccaggatttgatggtctcgccgatagtcaggttaaagtactctttgaacagccagaagcccggatcgttcacatgagagaaaatcacactaccggaaccaaccgcaataaccatcagctccgggctaacacccgtcgttgcaatcagcggtgccgcgataccacccgcagtgattgccgcaacggttgcggaacccagcgcgatacgcagtacggcagcaatcgaccaggccatcagcagcggagaaatgttggtttcgtgcatcatggaagcaatgtatttgtccacgccgctgtctaccagcacctgcttgaacgcaccgccaccaccgatgatcaacagcatcatcgcaatgattttgatagcttgacgacgtctgccaccaccggaaccaacaatgatcagcggggaagagcggtcagtgactgaaggagcaccctcactcgggctagagcggtgcacggccggcggtggcgacgcacagggtatgcggctctcgagctcctggcggacgacggcccactctgccggcgggtcgtccccttccgacttcacgcccgaccctcccagaccagcagggcacgcgtcgtgtcccgcagccgtcgccgccgtcgtcggctgccccgctcccttcccagtcgattgatcccgcgaagcggcctggccgacccccgccgctggtatagccggaaaagcagggaacatgacggtccgcagctgacggacggccgtcagcgggagagctggcgagccgagagcgtggcggaggagggaggggaggcccctatctcccccgcagaaattctacggtaactccacgactccggccgcttccgtcggcggcacctcgctctcgctcgccgactcggccgacgaaatctgcgacatcttcgtcacggtcgatgccggtttgatggggtgcgttttcattctcatccatctcttccgaatttccggcattctcatccggtcccgtctcgtctcgcctcctgcccctctcctctccttgctctgctcatcccttcctctcctgtccgcgctctcctctctcccacccgccatgccgcctgtcaacccgcccatgcagcccagcccgccgcctcgtatcccgaggctgacctctatctccctcctctcttccctcggcgtacaaaagcggcatctggctcctcctagccgtcgtccagctctacctgctcaaaatacgctcaatcaacattcaaaaatttgtatttagagaataaaaatgtggctatcggatttacagagtatttttttaatttcaggaaaataagttttaactgtttttatagaaattggggtcggtacgactgccttgggatttttgttcatgattatggtaaacatgaattctctttcgctactaagtgaaatggaccatcaaattgacggaataaagtcataatgctaacattttagggaattttcatgttttttgatggacctctattgtcgcttggtaatgtatgtttagtaaacaaacatcctaagtatatgaagtgtccttagacgtgaattattaactttcatttcatttcattgactcacatatatcaactctctattattcctgtataacactaatacgtatatagagatttttgtcgataagctcacacaggcgcagttgattaatggtcgtctggcgattgcccgcttgttggtcgataacaatagcgaaggtgaatacgccattattcccgccagcgttgccgataaaattgctcagcgcgatgccagcagtatagtgttgcacagcgcgctcagcgccgaagagcaggatgaagacgacccgtatgccgacttcaaagtgcctgatgatttgatgtggtaaacatagataagtcgtgcgcagatgcctgatgcgacgctatgcgcgtcttatcaggcctacggtttatgggcgaagtgtagaccggataaggcgttcacgccgcatccggcagtcgtgcgccatgcctgatgcgacgctttgcgcgtcttatcaggcctacggcttacgggcgaagtgtctcttaactcaatctatttccagatgattgtatcttgttcagaaatcgatcgatcatcttttgccaaatcccaaagcttttggaacaatgtatttatacaagcagagaggtacgaaccctcattaatttatctagatgacgttcattgtcttatatcttcctcaaatgaaaatggggagcttggatttgtggaagagcgagaaatagcatttttgcaacatcaaataattaatttaaaaagaaaaagaaaaataattttcattggatttggggaggaatttttaacgttctcagaaaatttagttttgcctttgctttttcaaataaaaatagctctaccatcgcttgctgtgactaggaggaaagagattttaacaactatctttcaagaaaatttctctgatataactatggatatccgttggattgtcaagggccgtcgagagcgcaccggattcagcatgaggcgctgaactcttccaaacaccataccctagctccggataaaccgatttcagggtagttcaatggtttgttaaaaagaaaagagaactcttcccagggctcccgccgacgtctccaacttcatttacgttgccgtgttgattccaccttctggttccggaatattaaccggattccctttcgataggaggcacgaaaaatcgtgcaactttcatacggagcttccctatctcttaggatcgactaacccatgtccaactgctgttcacatggaacctttccccacttcagtcttcaaagttctcatttgaatatttgctacttccaccaagatctgcactagaggctgttcgacccaggctcacgcccggccgaggccgaggagctcgtcaaacttgcagagagcaaaggactggtgctcgcgactttccaaaacaggcgttgggacagcggtccgtccttctctctctctcgcccggcatggtctgcgcgctgctctggttcgcttcgctcgttggccggccagaacgacccttctccaatcgtcgtcgtcgcttgcgagatgagagggctgataaatttcccctctcgcgcccgctgccagacttcctgacggtcaagagcctgctagcaaagggcgcgcttggcaacctctccgagttcgacgtgcgttccgctcgcgagtcgggacaggcactgttgccgatgtcgttaccgtcgctggttggccttccgccgtttgacctgggctcgagactcaccccccccccccccaaccccccccgcctcaactacgtcgtgcgtttgagcaagctacagcacacgtacctcaatctggaggtggtgcgcgaaataaaagcgctctagaacgagcactaaatgttgcaaacgctaggcttaatgaagttgtagtggatggtatgacagataatggaaacacatcccttcctacaaaagaaagcaatttggataacaatgtcaacattatccaaccttccttacctgacaccggtaaaagattgcttgatgttttagaaagtatagcgatgaaatccaattctgtctaccatctggctgaagtgaagcttgctcaaattattccttctttgtctgatgaaatgaagcctggagatacgctcttggatagacctttgactcctttttcattggttatgttagccaaggaatcgtatgtactttatgacaggggtgagggggtgaaggacggaggtcagcgagccaatcgcgctgcgagagagagagaaagtgaggggagggtgcgagagaggggaggacgtaccttgtcaagctcgcccataatcgtgacaacaaagcgcggatcaagcgtccgctcggccaccaaactcttgacaagcgcgaccatcggcccgctcatcttttgcctttcctcgccgggcgcgcgcgggtccgtcaggatgttgaggaccttgagcgcgagcatgtctgcgccggccgggaacttgcggaggaccgtcagcagcttgccgttgttggggcccatcgaacggatcaagggcgtcaggatgagctcgaacgatggccggacgggttcgggcaggtcgatgtaggcggtgaagatcctgcggaagaggaagggtttgaaatcatctgctatccgaagtgggagcattcatagtgatattcgtgtttcacagctcagagaggtgagagcagctcctattcaagagttgatgctaaatctttatccaaacatttatgcactacatcaattacagcccactgattgtcttcctgaccctgaaaatacgggttgtctacctatcaatatgccactttgcgttcgagcatctcgaaaattcattgaggatggcggtgcttttttaatcgtcactggccaaaagtcttacttatggtttcatcaaagaacctctcctcttttacttcaagatctattaggtgttgagagtcttgaggatattgattctctgaaagcgcttgagcttccgacattggacacagttctttctgtacaagttcgcaatctcctttctgggctatacctgccagtatggggaccaaatcttcagcccttaagtaattcaggtaaacaacttgtgtatttgaattgactcctgctgagctttctttatccagtttcaagatgagcattcgcaaacgaattctatccgtcttgttcccactgactaaaattgagttggaacggtcatctgcagcaatagtaatttgtgttctgctgccaataccaggttgagttttaactaaatcctttaaagtatttgctacatccatagccaaagcatgatgtaaacgaaccatgtctatgccgttcgcacttgagctatctacttgtttgataatttctgcaagacttttaatattatttgctctgccagaaaggatcagcatattagaaggagcataagcggaaacgctgctccactgaggggggagaaggggtggagcgctgtgccttgtggagtgggctcccagtcggagggtcgggcgcatcatggtccttcgtcgaagcagcgcaggtctcccatccgcgacgtgtggcagcgcccaaggcaaggagagatggagcctttctcctacggcccgtgccccctcccttcgacccctcttgagacctccgagtagaagggcgagccaaaggaaaagagccctctttttcaagagaaagactccagaacgcaccatcttgtcaaagacacactcgcccagccggcgctcggcgttccggcacggatagagcttctggttgtgccgctcgagacactgccagtgctgctcgtagagctggccgcagttggcgcgcatctggttgacgctgggggcgtgcgagcgagcgaggggggggattatttcactgcccctaatgtgctgatctggagtgccgtatgttctagcaatagctgggctgccatttaccgctcttctcctcttttggctaaacttcccgatgggtctaccgaggtgtgtactcccaaaaattttatttggccgtatgctgggcttcctaataccggtcgctctaatccttatgcacgaatctctgagattttcaacgtgaatcattttgttattacccagtctcgcccttcgttgtttcctacattttatgatgaacttcatcatcatcgtgtttcaggatactccttaaaaatgatacgcttagtaggattagaaatggcttatcgtttccgccaactggatattttgggtcttctacctccaagactacgtcgattttttgttgacgattatgttccaagggtgtttgttgttctactcttttagcctggtcatcccaatcattctcttctgatacctttattgtcaaaggaattagagttaacggattgcaaagagtttcgacaggtacggtcttaaactatatgcctgtgcaagtgggtgaggaaatcagttccaactcaacagctcaaattatccgtgcactctatgagacaggttttttccaatccgtttcgcttgaacgccaagggaatgttttggtggtcaatgtggtagaacgagcaaccataggttctattacagttgtaggaaacaaagaaataccttctgataaaatgaaggcgtttcttaaagaaatgggtttggtcaaaggcagagtgtttcaaaggtcctcactggagcgtttggaaaaagaactgaaacaagcttacacggaagggatgggctggagggggctcgtccgtcccggccttacacgttcgttcttcctcctctctctctctctttcgctcccctcgtccccccctcttgctagggctgacgtcgactcgcgcgcttgctcgatcagcatccgtcctccagccccactcggcgccccttgcctccgaagcatacacggcccacaggctcgcgcacggcgtgcccgaaggtccaagcgagctcgtcccgctctcggcgttgccgagcgagtcaaacctcgactttatgggcggcggtgcgttcctcctccttcgcttctcttccttgcttttcataggcactgtctcctcatttgctctctcgccctctcgcctcttcccctcccccctttcgacccgatcccttcctcttccctatcccctcctgcatcttagttcgtcttaacatgttttgcgcgctcctgcaaaatagcaacagcaggcaaggtttttccttccagacattccagaaatgccccacctcctgtggaaatataagaaatttgttgattcaaatcataaaggtcaacagcggccaaggtatcaccaccaccagcaatagaaaaggcatcactctcggcaatcgctatagcaatggctctagttccataagcaaactgcgggaattcgaatacaccaaccggaccattccagatgatggtgttggcgtcatggatgaggtctacataatctcttatggtttctgtgccaatatcaaggatcatatcgtccgcagccacattacacagagatttgttgaaagcagggcagttttcactaaatgttttgcctactacaacgtaattaacagcgacggacgcgcatcttccagcatcattttcaggcgatcgtccggatagccggtatccagcggtagccaggccgctccagcttcaactatcgcatggagtgccagggtcaaaaaggccgagcgcggtagtgccaccgccacgctgtcccctggtttaacgccgcgctcacgcagcagattcgccagcgccaccacctgctcgcgcatttcccgatagctgaacaggtaacgcgcatctgccagcgccggagcatccggtgtttttgccgcttgttctgccaccagcgcgctaagcgtggtttctggaatctcaacctgagtggcgttgagctgcgccagctgcgcatactcacctggcagcataatatcgacatcgccgcacaacagcgccggatccgcggcccataaccgaggcctttttcgcccattatggcgagcgcgtggaagcggaaatcatctccccgaacaaaacgccagacttgccaaacttcgccgaaacctttgcccgccagagtagctgggaatggaacttcggtcaggctccggcattctcgcatctgctggatgaacgctttacctggggcggcgtggaactgcatttcgacgttgaaaaaggccatatcacccgcgcccaggtgtttaccgacagcctcaaccccgcgccgctggaagccctcgccggacgactgcaaggctgcctgtaccgcgcagatatgctgcaacaggagtgcgaagcgctgttggttgacttcccggaacaggaaaaagagctacgggagttatcggcatggatggcgggggctgtaaggtaggcatagaaattgttagtcctccaggaacaggcaatgattggccaccttgacttaaaccattaccacgaatagtcactggtaagtgatattgattggcgaatagaattaatgattgcaatgactctgtgctttgaggggcggatacagctaccggctgtgattgaatgagcttgccaaaatcctgaccaaataaaacaagcgattgctcatcactgagcaatgcttgtccggtatcttccttatactgcttgattttctctaagctccactgattttgcgacatgttgattcctttcttttgccaattccaatcgtttattgcaagcaagaatcaatccatcaaacatcttgctgaatgcatcatagcaacgatctaccatccttagtgcttctctacgagtgctaattgggtgtcaatgactggtgtctggctgtccttttttatcgacagcgcaccagctccgacgattgtcgtcttattcgcggtcgtgttcatcatgacgtttaccgttaccagcatcaacgcacgcacaaagggaaacgcccatacacaggatctgttatcacccaattagcacaacatccgaggacagcatcgtccgccagcctacagaagtccggaaagccatggaaggtcgttgggaggaggtacgaattctatcatgcaaaaaatacgtaaaatcgataacgcctagaaatcattcaatactcgcactatcgaaagtttaccagccaaccgcggcacgttcctgcatacgacgtgccgcagcttctgttattccacgataaaattcctaaccgaattcaaatccttcagactgtcgtgcggccatcatattggcaacaaacacagtcattgcattcaaaccaaaccagaaaccatattcagtcgcactcaggtgcagttgtgtgatcaaaatacctggtgattgagcacaaaacaagtacaatcccagcaaactggctgatgcaagccatgtgtattggcgaaaatccgagttacttattatctgcctcatcacttggtgcaccctcatctggggcagctcgggtttgggataatgataatcggggatgtaatggaaggctatgccactcattaataacccaagcaaggttaaaaagtagaatccactatgccaatcttgcgtcatatccaacaataatcccccaatgactggagcagaactggcaaccatcgaattcgtcccagacaggatactaaacaaggtgctttccttttcctttgcatttaccgtgctttctgcggggagcatcctcatcagctgagtcatgagggcgcttctcgcgaacgtgttcatcctcatcatcgtcaaagatattgtcgagacgatcagaaacggtgtgaaggaaatcacgagcaggctgaaggaaagagtcaagcttgtctttaaatccagggtgttctaaggcagtatcatcttcaaagtcatcattaaacaatttttctggattttctacgaagaaggatgtattgcacgctattgagaaagtttatgacttgttgcttgactttgagcaagccctccgtaaagcctcaacgctagaaactaccgatcaggagcaaatagatacatggaaaactactttaagcgagaaattggagtccatttggaagggggaactgccagtgcgctttacaggtgtagcgttattatttcggttcagtaccgaaccattttttgtagatttcgttgtaagttccgttctcgcgcagggttttcaacgcgccgttgactttgtcacgcagctcgtcgctacctttcgggaacgcaataccgtattgctgcgcttccagagagtcacctaccgctttgaactgaccgttaccggcggttttgatgaagtacagaatgtttggcgtatcgtgcagaacggcgtctgcgcggttggtgcccagttccatataggcgttatcgatgttcgggaactgacgcagatctttagttttgatgtttgctttcgcgtaatcaacggagccagtaccgctcttcacagcaaccactttcccgtcgagatctttcacgcactgggttatgtgtatggtaatcggtattccacttttaattttcttactgatatcccctgttcttcaaacacccgcactttgggaaatcgttgaaacgatgattaccttatttcagtttgctcaaatccaggctttgtattccatgatggctacttctcttcctgctatcatttacagttggggccgtaatttcatgtggtcgatgggtattatcaggattggcttcatgcaagatgtttttacatggtacgttaaatcaactggcggcacgccatctactcttgtagatttgggtatacatgctaatgtcgccctcgcaaaacgtggtattgatttgggctctctcgccaagcgtgcaactactactgtcaccaatagcacaagtgattctattaccctgaggggaatcttgctaacgttctcggcatgttcttcctcaggcgtgtgtcctaacgcctttgccatgaccttagtttttcccataaaaatacgactacccttccaatcatcacggatacgttttaaatatgtgtttctcatattagtgacatcaaaaatccacatctattgaaaataaacagttagtaaaacagccatttaaaattttatacgatcgagtagaaggtgcaaacagatgggtatttgttagcagtgctaataaataagtagataattgaaaaaaaagtataactttaaaacctcaacgagaactcataatctaaaaagctgtactgttgaacttcaacttcaaagcatttggaaacaccttcgtacaaaaataggcaattcaatcactaaaaataagcatctaaatccacttccacggtggttttcatatcgataaaactgtgcggatgggccagagccgggccggataccgccaccgtggtcaacagcaggcagcttacccaacggaatgaaaagcctaaattgttataatgtaacattttctatcctggccgttttcgctcatcaccattctcacctatcatcgttctcacctctcactgacatgccgtcttactcagcgcgagcgagtactcacctgcgggcgcaacatgaacgccggcagcaccagcaatgccatcacccagaaggttccgccctgaaggtactcaaacagaaaaccggacaccaccgtcatcacggcgacagcgcccccggtacccagcgccgaatacgccgcctgcaagcgcagcacgtccgcatcattacgtgaggagatagcgacggtgagatggacgagccggaatctaaaggcgccatcaccatcgcgacccgcgagaagctggacaacctggtgtttgtcattaactgtaacctgcagcgtctggacggcccggttactggtaacggcaagatcatcaacgagctggaaggcatctttggtggcgctggctgggaagtgatcaaggtgatgtggggtaaccgttgggatgaactgctgcgtaaggataccagcggtaaactgatccagctgatgaacgaaaccgttgacggcgactaccagaccttcaaatcgaaagatggtgcgtacgttcgtgaacacttcttcggtaaatatcctgaaaccgcagcactggttgcagactggactgacgagcagatctgggcactgaaccgtggtggtcacgaaattaactggtatggaaggtcactcgttttcaaacccgattatgtgatcaggttgttattatttagattaatgtttaaattttttaatttcttgatgtgaagttgatgaaactttgaaaatttaatattcttaattgttcccttctttataagaagagcaaggtgccatcattagagtgacagagtgggatgtttaagatcatgcttcagattattttttgtttctctgcagtgaattaataatcatcacagataatttcattctgaaattacttcttttgggagtgttttaatcttgatgaactatgtttttcataaggagtatacactcgttgatgctctgaaggtattttctcatttctgaggatgttttgtcgtaatcgagcataaacttattaagttctttatgttcacgccggcctagcggaacaagcccagcaaacatcgccccgaatacgacggtcagcgctccaacaatgatctcgatggcgcgacgatggctcacgagtaccttgccgagggtgccaataatcgtcccagtagcgacgaagacgacggtgaaacccaccacgaaaaggactgtgcccaccacagtacgtgcccgacgctgtccttcaatgacgtctgcggcccccaggcctgtcacatagctgagatagccagggatgagaggcaagacgcagggggaaaagaaggacaacaaaccggcaaataccgccaccgggatcgctccggccatcgatccagtcagtgccccggctgcccacgatcccaggtcgagcggcgtcactggctctccttggcaacatcattaataccaattgctatttggattggtctaatttctcttcacccaaaattacgaagctatctcattcagttttattctgctaaacgagaccatgtgccatatcttcaaattcgaaatgagctcgcccaagtttggaggcacgttgacatttccggttcgcaaacaactactcgctacacttcatttccaaaattcaatccggagaattcagtgacctccctggatttggtcgaaccgccagagaattattcttgggctcctcaaagcgactggacttttgtacctcctaatgaatttcggagatttatcttatggaatccccaacctccaaagatgaacagaaaatcgtcacacggatcaaatttgcccttgtgaagtccttaaagcaaacattggttgtaggactttaaccccgtttagcgacaacacggtaaccatcagccttcccgagaacactgagggaagctttgacatgttctctatcgcagccatcaggacagcgctggccacttctggtttcatccgcagttttgaggatgtcatatgtcccagaagcaacagggccgtttttcattgcagtgtaacgatcgccactaattaagcgtccgtacttttccaaatgaatacggtctgcgtagtacaaaatctttcctacgtggtacaagtcagggatcggcgcattggaggcaacgtacagaatggcctcaacagccttctccgcatcgaatcgtctcttaagcatctcggtttcctccttctcacatcacgtacaggctttcaaaccacaaaatgtagttattacgcattgtaatagtcagtacgataatccatctgctgcagatttgatatttgcctgaccaactccttcagtagtgcgtactttttcaagtaacgacgtttgctccgcttccggcaatgaaggtttcaaaaacagggaaatgtgcccccctcgctgccaacgattggttagttcacttaaattgtcagtgaataccaaaaaaagtgtaggtaacgctaaagcgatggcaataacaatgacggtcatcatggttgctatcggtttgcggcagaaaagattcaagctattggccgcggcttgcaaatgataggcaagaagagattgtgatcgttttaacacagccttcctcctttcagcatgacgatgcgatgtttcattccggctattaaagccaaatcatgggttgcaattaatatactaactccaacctaaaaaactgtttaaaagtaaatccattacgacgaagcacggatgtagactgtgacatgaaaataaaaccttgcaggaaaaacggcgatagcaccgggtgagaacaatacccgagaagcgatatccatacaaacagatgaagattgcagccgtaacgtctataatcagcgccccacacagaggtagaacatgactgtaacgactttttccgaacttgaactcgacgaaagcctgctggaagccctccaggataaaggtttcactcgcccgaccgccattcaggctgccgccattccgcctgcgctcgatggccgtgatgtactcgggtctgcgccgacaggcaccggtaaaacggcggcgtagctgctgccagcgttgcagcacctgctcgatttcccgcgtacgaaagctctttgcagttgctcggccacgttggccacaacctcacctgtcttagtttttactgcccgaatatcgatattcggctcatagttcacccgcaagcaatcgcgccagagttctacccaacgttcgtgcttaacgtagttcttccctttaaaccaagaaggttgcaccatcagcagacagtgaaaatgcggatgtgcgctgccatccttacctcgcgtcacctccgtagccctgatccacccctgaacaggtgatagctcctttcgcttttccattcgcttaaacgccgcattcattgctgtaaggactgttccaagttcacctagcgcgcagttcctgacagtaaacgtcagaaaaaaccaacgggaagaccggtaatccagaacgatgatcacaaaagcctggacctttagcacagaactgtggcaaaaaacgttgatgcgccaatattgctgcaccctgagcgccattaaagtcagaagatgaggcggcaataaagcgcacgacctgatgcggcagtggacggcgcaggtacttttgggtcatggcaacgagagtctcgcgtgggaaggcgggcatatccatcacgccaccgcccaggatcaccgcatcgggatcgaacagattaatgctggtggcaatggcccgtgccgcgttttcaagcagactctggacgaaaggggcgttttccgcatggacgaaaagatcgcgcaatgggtaatttcggggctgttgttcgtaccagcgtcttagcgccattccagagcaattggtttccaggcacccaggattgccacacgcgcagtgttgggtatgccggcggtactgatggcgagagcaccacagacgcacccgaagaggccggtcacgagaagctgcgagcggctgagccgacgaccggggtgctgccgcttgaggtgctcgagcaggttgacgtacgggttgctgcagagggggcaagcaaccggtgccatggcggtgggtgcgagccgagctacagtgggttagggttagggtttaacggggcatgcgatgggagcacagggtcagaggcgctatagacttttagggtgtagggttagggttagggtgtaacggggcatgcgatgggagcagagggtcagaggcgctatagacggtggtacattggaggcgagaaggagttcaagtggctaaggggcttcgcctaaaaggcgaagaagcgagcacgggcacggagccttaaatccaacacaagctttggctgttcgtgatgctttgtctatggcgatttataactgtctttttgattggattgtcgaacgtgtcaacaaagctttggtcacatcagacaacagcgtttccaattcgattggtattttagatatttacggctttgaaatctttgaaaacaactcttttgaacaactgtgcattaactatgttaatgaaaaattgcaacaaatttttatagaacttactttgaaaactgaacaggaagaatacgtgcgtgagcaaattgcttggactcctattaaatatttcaacaataaagttgtatgtgatttgattgaatccaaacgacctcctggtcttttcgcagcaatgaacgacgctatcgctaccgctcatgctgactctgctggctttgggctggccgtcatagctcgcttgggccgctggctggctgctgctctcgaaggagaaggtcggcaaagcttgcccgggttcatcgtcgatcccctcctgttcccccattcgccccttctcccgcgcattcaaagccctgacacctcttcccttccctctgtcagtccgcgtccgccccctttcccaagccgaacaggcccgccttccacctccgccgccgaccgctggtcttcttccttccggtgatggtggccttgccggctcgtcgagcgcaggagcgaggaaggaggtgccgattggctttggtcatggcggaagggggtacggcgaggtcatcggttcgtttcccttccttctgacagcagggggttcaaccgtgttgctcaagggtcgctaattggtcatggcactggtcaccattctttatggctttctgatgtatttgccacagcaggatatgaagcggttgctagcctggtcgaccatcactcaacttggctggatgttcttcggcttgtcgctctccatcttcggctcgcggctggcgctggagggcagcatcgcctacatcgtcaaccacgcgttcgctaaaagcctgtttttccttgtagcaggtgcgctgagttacagctgcggcacgcgcttgttgccgcgtctgcgtggcgtattgcacaccctgccgttgccaggcgtgggtttctgcgtggcagcgctggcgattaccggcgtgccgccgttcaacggcttcttcagtaaattcccgctgtttgctgccggttttgcgttgtcagtggagtactggatgtgtattgcaactcgttgtcgtagagttccagcaacaaatcgaaggcgaaactcttcaactcttcacgttgtcccagagatatcttttccatgtttttctgatatttatagcctatgtagtaaccgtggactgcttcatcgcggataatcagacggatcaggtccgcggtattggtcagctttccgcggctggaaaaatacatcggcagccagaaaccggaatagaacaaaaaagattcaagaaacacactggcgattttctttttcagcggatcatcaccgcgataatgttgctgaataatctgagcttttcgctgcaacggtgcgttttcttcactccaggcgtaggcggcatcgacatctttggtctggcatagcgtcgagaaaatcgaactgtaagagcggccagggggtgaggggctgcgtggagatctgcgacgaggtcatcctgcgacgaggtagtgctccgctttcggctttcggctcctgcgtttatcttgcgtccgctgctagcccacccgcctgcgtgcgagcgtgcatgcgagctgccgccgctgctgcgagcgacctccagcccaacaacgtctgcgtttatgcccgcctcggcccatggtcttccgcccgcttgtctgacctgccgcccttgcgtcccgttcgcagaagaaagaggctcgaacgcaacgcaccttcggtccgagcgcgaccgtcaccttgcgtccgatcaggataaacgtaaagaggtcgccgtgctggtgcgcgtcatcacaccaatcgagaaggggaggggaggaggggtcagcagtgagtggaacaatcccatagaacgccaccaatgaaaacaagctaacatcgataatgattccaaatgccgatgaggtggcgattcgagtccaaacggtggtgataaattcctttttcagggaaataccccgtttgcgttgtctggatttgatgagtgaaataacggtggaattgatggtcatacccagaaagaaggcggtggcagaagcgatgaacattcgcgcctgattgtgaagtatcgctcggtacggttcgtcctctccaatcgccagcatattggttacccaaacatcaaaaacaaacagtagattgcaaaaaataacaaatagcaccatctgtttggtgcgctcaattccataaacgtccgtcatcatatctgcagcaaggtaggccagtgaaaagacaatacccaagcaaaacaacttgctgagatgggctatataggctttgctttggatatgtatgggcaaggacaaattggttctaacaatgatgaaaaaatggcattgatgcaacccttgtacagcgatcgctctttgcttaggggacggttgtatgccgcattggaagccattaaatcaatatcggtagtcgataacaatcgcatagccattatagggttttgctttggtggtttgtgtgcccttgatttagccaggagtggtgcggatattcgaggagcagtaagttttcatggctttcttaataaacctgagaatctagcatccggaagaattaaagcaaaaattctggccttgcacggttatgatgatcctatgtcgaaaccggaacaagtacatgctttttgtcaggacgagttctgctttgcctcggtcatcctccactggtttgccttcaacttcctcggctgaccaagggccggacggaagatagatgcgcctggaacggacgaagcgctgacccaaggcagcaggtggagaatcttgcgtcacgtaggagcgagcgcgcaagtcacgacttggttggccctcgagcagtcggagcttcagcaaaggcagcagaggcatcggtgcaggacgccagcggtcaggagttgctgagccccggtgcttcggctcgcgctgccctccagaggccagcgacggatgcggtgacgagtgtaggggcacgatgggcgggcggcgatgggagcaagagtggccgttgcaggccagccgccaagcagcggctatgacagtcgacagcctgtcgtcggtttctaagttgcgctcccttcctctgcttccgtctcctcccctcgtctaactctcaaactcctcgcctcccgtccatagacccgcctttgtcattgcatgcccgttacaccctaaccctaaaagaaccaaccctctcgcgtacaaggccagctcggacgcagccgacgccgctctcgctccggtccttctgcttgatatcgacgacgaccgacccctcgtcacccagcgcatgcgatgcgacaaggccttcaacgcccgactcgagcgcaccgtccaacggctgcccggcctagctcgtgacaccatctccgagtcggccaccgtcctcggtcgtcactggctcggtgtcgtgccttttcgatccagtctcgagctgtcggacgctgacgtcgcctcgggcctttctcgctctctctgctccgtgcccgtgctcgcttcttcgccttttaggcgaagccccttagccacttgaactccttctcgcctccaatgtaccaccgtccatagcgcctctgaccctctgctcccatcgcatgccccgttacaccctaaccctaaccctcgtttgcccagtcggcgtccgagaagcccttaagacctttacctccctcgtacaccaacctcacagccggcgcaccccgtaagtacctcagtactcccttcagggcggccatgtgcaccgctccaggatgggcctggaagcgggagagatagttaacggcctgggtgatgtcgggcctcgtcatgaccgacaggtagttgacggagcccaacagggactggtaagtcgtcacttcggccggaggccccggccacttcgccctcaattgccccgaccgggccaagttcggcttcaaggacggcggcgccggccgggcgaagtccaagaggtactgcgagtaccacaagaccatcagccacaatacgactgactgcaacgccaaggaccggcacggctcaggcggcgggcagcgacacgtcggcaacgccgtcaacttggcccagtccgtggtcgctgccggccttcggccctcggtcagcaagtttgttctctcggtgactcctcctccgcccagcccggagccggtcgccgacgacgaaaggccttgcttggactccaagtggccgtacgtcccgccggccccggagcgctgcttcttgctcgacagcggctgctcccagacgtgcgtcaatgaccgcacactcttcaggtagctggcgagaaggccgggcgagcgggcagagttagtttcggtttcgctcaacgcgggaagaacgggcgagcgacgggcagcagagggcaaaggcacggtctcggctggtcgaggggatgaaaggagaagggcaacgaagacgtactcgaccccgccgccgcacgagacgcgttcaagcccccgccgcctgtacgcggcctcgcagagcgtgttgaccgcggtcgtgaaaagataggcgacgagcgggtggtggtgcgtgtgaatcttgtctatggcggagagtagggggggggtcagtcggcttgggttcctttgaatgcgggttcggggtcgtcccggttgggcgaggatggaaggcaagcgagagccagctaggatgcgagccgcagattacaccacctcgacgacgtgtacatcctgtcggaggagcccggcgccctggactcggttgccgccttcttcgacgaacgtcccgcgtgcgggcttgcgctcaacctgcgcaagtgtcacgagacgccgctcgctatcgtcgctcaggacggcctcgaagtcctcggcacctgcgtcggccctgccgatgtccgagccgccttccttgctgccaaagtcgaggcccagctgccggccctctcgcggctttccgacctgcccggtcaagaagctctcctcgttttgcgtcactgcttggcgagcaacctccgtcatctgcagcgctcccttcggacggacgacctgcctggcgcgtgggaccagctcgacgaggccctgctcgagcgcttccacatcctccggtcgtcgcgccaaggaaggtggaactcataaggtaagagccaatgtcatttgcccggggtttgtccgtactcctctcgttgacaaacaaattccagagcaagcaaaagaattaggcatcagtgaagaagatgtcatcaagaaagtgatgctaaaagaaacagttgacggggaattcaccaccacagacgatgtagcacaaaccgctttattttttgcatcatttgaatcgaatgcgcttacaggacaatcattggtagtcagtcatggttggttcatggagtaaacaaccatgactcgaactaaaaaatctgcaagacagattgagtatcgccatattgcatgcagctttcagggaggaggggctttgggtgcctatcaagctggagtattgcatgctttaaatgaagttacggcgatagtcagtacttggtgaaacttggtactggttatctgctgaaagatgatggtcctcccgttgttcttaatctgacacagaagcgtcagagattctccggagatattccgcaatgagttactttggccttaatccagtaaaccagaatcagcagcttgacgaagcagcatcaaatccagctggctttaacagcgatgttggttttttcgacaatgctgtaggagcggcattgtctggtttgtactccgggctggtggcaaagccagatcagttgctatgggcagggatggataaaatcgtatccccgattgctcagtttgttaacgaaaacacctcgatcaatgacacttcagtttcatacattgctgagcagagaaaactagcagagcagcaggcagcaggctgtagatcagcatggagccgtggccgttggacagcacgaagcggtcacggtcagcccaggacggattctgcgggttgtgtttcaggaaatcacgccacaggacttcggcaatgtcagccatacccataggggcacccgggtgaccggatttggctttctgtactgcgtccatgctcagcgcacgaatagcattggcaagctctttacgtgaggacattttgactccagatcggatgatgaagggcacgcccttaacgacttgacgacagcgcgttttgggctacgccggaaaatttgccaacaatttaccgcaagccgcgcgtcatgtacatggaacatccttttgccgcttcagaaatctctggatcatgctcgcatgttgcgcaatctaggcagatactttattctgccatatctctttcccgtccgattgattaagtagtaccaatgtggaggcattagttcctacagcaacataaccagcagctacagttggtccactaactatattattttttaatgcggtagaccactttatctggccatctttcctgttaactgcctgaaccaatccacttgcatctgcagtataaattacatcgccacgaatagctggtttgatatttaaatactcatttgttttatgagcctttccaactggagttgtccagctttgtgccattttaaccttgggctgaatttcttttagctctttgggttggggcgtattatccttaccgagcatataatcatccacatatgtgcatccttgagttaaggcacatagtattccatggtttcgaacgccagttcaacgcccgctttcaccatcgcaatcatcagtacgcctttatcgaagtactcctgctcgccgattttgccttcatactgcggcgcggtttcaaacgcggttttgccggtctcttcacgccaggtcagcagtttcttatcatcgttggcccagtcggccatcatgccgctggagaacgcgccggagatgatgtcgtccatatgtttctggaacaggggtgccatgatctctttcagctgttcagaaagcgcataagcacgcagtttcgccgggttagagagacggtccatcatcagggtgatgccgccctgtttcagtgcttcggtgatggtttcccaaccgaactgaatcagtttttctgcgtatgctggatcggtaccggcaagggcagctggtgcagcggcgggggggcgaaggatggctgctgctgctgcttctcctgtcgctggggttgaggttcgtggtagtggtgatggtgctgggatgggagtggagtgaagtcggacgtcgtcgtccggcccggaggaggcggggaggcgttgactgactgacccgagagggccgtgttgagcttcggcaacgtcgtcggcggtggtggagcgagaggttgaagaaagagaggagagggcggcggctcgggctgccggccgggcgagacgagctcgggggacgagaacgggtggtggtggtggccggacgacccgtggccgttgctgccgctgccgccgccgccgtcgacatcgctcgactcgccaccctcttgctcgtcatcttcgtcccggcccagtacgccccgggcaggcccgactcgagcaggagggccgtgatcttttcctcgatcgtccggttcgcgcgctccgccttgccgttctgctgcggcgtgtcggcaatcgttgtctgctgacgaattcccagcgagcgaagccagctaacaaactcggtcgacaggtactcgccgccgttgtcgctgcggattgtgacgaccctgtgaccgctctggcgctcgacctgcaggatccagcctttgagcacaccggctgcgtcgcttttagccctgatcgaccaagcccagtggtagtccgtgtactcgtcaatgacggtgagcatgtaccgggcgccgccgagcgaggtgtcaggcatcgggccttgtaggtccgtgtggaccagctcgaggggcccgcgtatctattcccatattcgccaaagcaaaaccacacgaatggcgtaacatgtgcggatgaatctccagtgacaacccggcattaccaccggaagtcgagataatatggtaaaactgttgccgagaaagcggattccccttacgtgataaaaatacccactcgctctcagcatgcgggtacgaagtacggatactcaaccagttttttaaagcctgaacttctttattcaatagcgggtgcgttgttgaaaagcctttttttaatcgatggatatatatacactttgccttaagatcaatatccgaaatcctcaatcgacaaatttcactcgcccggaaaccatgaataaaacaaagcaaagtcagacaataattacgtgctgcatgaggcccggtcacctgacgctggcggtggcggaagcggaagcacatggcgaacagacggcgcaggcgttgcatgcgcgggtacaggaaagcctgaacaaggcgattaagaatggcgagctgtcgccgccggatcagacgttggtcgcccaggtttgggaatcgctgtatcagcaggcgcaattgcaataatctgcgcatggaccgaaatggcgaccgcctgtttcgagccgtggtggagtaattaacctcccgctgaaacagattccgtgaccggcatccgtgcggttacgggatctgagtcggctcattttttggcccgagctttatccgggctgcctcaacggcgtgacaaatctacaacccgtgtttttgccttaaccgaaacagtaacgcttatctggcatgggtaccagaatatagctccaggacccgtaatctttttgtactaagcattgaatgtaaccgagcatgcaacactcggtaatcgtttagtgagggttacaaaagacctacctgcattagattttttgcttggatttgttaagcttgaaaagtcatgagcattccgggccttttcaaaaacgataaaatgttttttagtattaaaagtaattaatatacaacatgatgacttaaacaaaactgtacgtctttttgaagctaactaaatgagatcttttaaaagtttgtccattattgtgaaacataaattcattatgattatatacaaccaaatcgcctttaaaactaattttccttttccactcttttaccgcttatgtcgtttttgcgtcttttgcaattcggaatgcgcagtcgattcaggaggacacgcaccgtctcgaccttctcaccctttgtgccctctccaccgacgagcacgacaaaccgtaaagtcccctccggaagtccctcgccctttgccggccgcatggcgtcgagccgacagacgtgcttccacccagcctcgtcgaggacggcgctggcaaggaggatctggccgtggtcggcgggcgaccagaggagcttgtgaagcgtgagcggagcggaaggggggagggcgaagagcgagcggagctgaggagggaggagagaggcgagtcagctcgaaggtcatcatcgaggtgtcggcgaagagcgagcgagcgggagagtgggagatcacgcggccgcgcgcgcgcgcgcgtgggcctcgctcgtcccgggttggagcaggggcaacttgaggtgcgaaacgatcgagcgaaaggcggtcgccatgcgtcgtcggttgaagggaagggcgcagaagcgggctttacttgcgcttgacgcggtcgaggactgtaaagcaaacgcaagaacgaccgttgtcagcgctttgcgccttcgcacgaccttgcacaatgccaagtgggcgagaaggaagggaagaagggagggggaggacggaccggaagcctccgagacctcgtcgtagtctgtgccctggacctcgagcgcgatgccgttgagcgacttgcggagggcgtccttggacctgtcccttatacacatctccgagcccacgagaccgatcagtatctcgtatgccgtcttctgcttgaaaaaaaaaacaacacgttcacgcatgcggaaccagcgggtctggaacggccggccgacctcaagcgaacgcgagtgagaacggaacatgaatgtcgcgttgtgcgagaggaaggaaagaaaggagcgagagcttcatccgggcctttgcgtacttcacgctcgccgaacccataaagggggcaagcaagtgcagtcgtttttccagccgcgcccttcgaagaagaagggcacggccttcttttcctcggtggttgtaatcatgcgcgtctcttcgaaaggagggaagggaggggaggaggaggggagggccactcacgagctgccaatttgcgggtttggtggttggtcggacattgagaccttaaggacgggcgggcggtcgggctcgactaggctcggcgcggggaggagcagtaagtgaccgggatgagcgagcgaagataacgcatctgcggcgcgaaatatgaagggggagagcccttatagaccaggtagtacacgtttggttagggggcctgcatatggccccctttttcacttttatatctgtgcggtttaatgccgggcagatcacatctccgaggattttagaatggctgaaattaccgcatccctggtaaaagagctgcgtgagcgtactggcgcaggcatgatggattgcaaaaaagcactgactgaagctaacggcgacatcgagctggcaatcgaaaacatgcgtaagtccggtgctattaaagcagcgaaaaaagcaggcaacgttgctgctgacggcgtgatcaaaaccaaaatcgacggcaactacggcatgttgaagagggtccagtcgagctaccctcacgggcgtctggactcgagcgcgaagcgcccggatgagaccgctcgacagagaatcctccgccgtcatcccccagtcgtccgtcgccgtcggccagctcgtcaccttgccacctctttccaagcgggccggtccggcgggtcccgaccttacgcgcgcgcccatctaaaccgcctccccatcccgcccttatgcctgcacagccgggggtaagacaacccagaacgctcgacagcagccggtctagctgcgtgtgtgcggagaactgaccatgccgacgtgcggatcgacgttcattatccgccggttcgtccctggcaggaggagctttgagtggacgagcttttcgacggcgaggacgacgccggatatagcaacggatccggtgagtaccgactgtgacccgagggtactggacttgagctggattgggtgaggcgagcaattgttcaggtaaaaacgaatgcgctcggtcagttccgggcggatgccaatattaccgccaatgataatgctttcagggtcaaacatcagtgacaccgacaggaccagtaaggctgcggtacgggcggtttcttcgatggtcacgatggcggcgggctctttgtcggcgtaacggcttagaatctcccggaccggcgtattggcggcgccgcctgcaaagtggtagcgcttgctgatgcctgcggctcccagtaccgattccagcgtcccctgacgtagactctctgacgcataggcatcgccgcccagcggcagataagggcttcaaccatagaaacactggccgccgccgagcgcctgaccgcccacaaaaatgccgttactttgcgtgttaacgcccttaaggagcaagcatgagcaccgtgactattaccgatttagcgcgtgaaaacgtccgcaacctgacgccgtatcagtcggcgcgtcgtctgggcggtaacggcgatgtctggctgaacgccaacgaataccccactgccgtggagtttcagcttactcagcaaacgctcaaccgctacccggaatgccagccgaaagcggtgattgaaaattacgcgcaatatgcaggcgtaaaaccggagcaggtgctggtcagccgtggcgcggacgaaggtattgaactgctgattcgcgctttttgcgaaccgggtaaagacataccatcaacaacattgtagaaccaaagacctaaatctccagcatggggaacaagactctcgggaggttcatacttatcaaagaactttcctctgaaagcaatacgatacctgtatattttctccaagggaactccgcctttaacgagtccattaattaaaactctggtggaagcatagacttgcatgtcagagacgatgcttccgaaaagggccttaatggctgctaagtattccttttcatcttccacatcggggactttggggtacaactctaagagtgctttggtaaccttctctggataatagttgttaacttggttaaacaaatcctccttggactttggtggatttgtatttgcataactggaatgctcgttgtttacttcccaattagagcgataactgctcgatgagcgccccgctctgtagcacgccgcggttctccggcgccagccgctgaagaatactcgcctgcgtgcgaatggcggtgatggtctggccgatatcgtcgtgcagttcccgcgccacatcgcgccgtacgtattcttccgtcgccagcaaccgctccgccagacggcgattacgcgccagttggttttgcagcgacaggttgagctcgcgcaggcgctgaatccccgcgccgagcagcaacccggtcaggctctgagccagcagcgagagcagcaaatccaccgggtgttcatgccaggtctggctggcgatgagcgcaatggcgttcatcagggtagcgatcagcgcgccctgccagccatagtgccaggcgagcgctttcaacgacgcgcgatactgtgctaacaacatacggtctgtgtgatggacgctaccccagcgggctttccagtctgcgttatcagctgctttggccattaccgcctgtttgaatttagctacctcggcggtggtcttttcaagttccgctttgcttcgctctaattcagcggtaagtacctccacatcctcgccagctgcgtgctgcgccttgatgtagttctgaaggtcgatagtagcctgttctttctggcgagcgcgttgcgcggctttcgccttatccatttgaacctgcatcattgccagacgttcgccatcatccttagcggtatacatctgcatttcgatcatctcgtatgccgtcttctgcttgaaaaaaaaaagcagaatgaccgcgtcaacataccgctgatgccttgatcaataaaatttcccccctcattcgagccattcgcgtagacgccggagatgttgagggcactgatatgggtcctcttgtcagccaggctcatcgacaaagagttttggccgctattgaaaaaggggttaatgaaggtgcccgcttgattatcgatggcagaacctttcaacatcctcaatacccacagggtttttacctgggaccctgcttgtttgatgaagtaactgaagaaatgtctgtctatcaaaatgaaatttttggacctgtactggttatcgtgcgagtcaaccattttgaagaggctcttgctttagtcaataaacatcaatacggaaatggcactgctattttcactcgggatggctttacagctttttcgccttctaagttgcgctcccttcctctgcttccgtctcctcccctcgtctaactctcaaactcctcgcctcccgtccatagacccgcctttgtcattgcatgcccgttacaccctaaaagtaacatcactctcttggccttacggcttcctccctcatagcaattttcaaggcgcaagtcctcatgtatcttaagcgttcacccgactgccttgtcccctgcaaggccgtgtcgttcaacagattaagagtctgatccctcaaccccccttcctcacgatggccgacgccctgctcaacctcgtcccggacgcccctccgtcctcgacgcagctttaccagaagctcgacgacacttcgctcgccaagtttgaccgcctcccttcgcccttcctgtctcctgagagattcaaaatttgcgcgcgataataccatccttcattctcccaccagccacttctgccagcttgcccgcaccagttcacgctctgcggtgaagcaatcctccgacacatggcccggcaattcctgtaatgccagatgatgaagttcatcgcgaagcgtagtgtaagcacgggtcagcgccatcgcttcctgctcttccataatgtcgttttgcgccagtagttccagaatacgcacgttgtctgaccagcgcgttaacttcggtttttcatgagcgtagcgcaacaccagatattgggtaataaattcgatatcggtaattcccccttcatcagctttgatatcaaagcgatcgcgatgtttattgccgagatgagcgccccccttcccggtccgtcgtttgctgcatgctcgcacacggggttgacgcgaccgtcctgcccccgcctcgccgaccgacgggccagccttcgtctgcaccgccgccctcgcgatcctctcgtcgctcgaccccgtcgtcccacgcgacctcctctcggcctggctctcggagcgccagctcccgtccggagggctcaacggccggcccgagaagctcgaagacgtctgctattcgttttgggacttgtcggccctggcgatcctcggccggatcggttgggtcgaccaggaggcgctgatcgagttcatcttgtcgacccaggtgcgcgtcgcgcgcgcgcatgattgcgatttcctttatttcacacccataagagcgcgcaaactgaccgcttgtgtttatcattaattttcacaccttgtaaacgatagacgtcctggacctcatttacaatgtaattagccagcgctccaacacctaacaagcgcaatatatcatgagggttaagtgcaccctctgcgatgatttcaccacgctctacgtgctcgccttcaaacactgaaatatgacgccatttaggaataagctcttcatgacattgatcttccgatacattgataatcaagcgtcgcttacctttggtttctttaccaaaattaaccaatcctgatacttctgccattactgcagaatcctttggttttctggcttcaaataagtccgctactcttggcaaacctccggtaatatctcgagttttagaacgttcttgcggaatacgggcaatagaagggcattgccgaggtaattatcggaaagcaacgaaatggcccaattggcacggtgagattggcttttaacggccaatactcacggtttgataactatgccggtgctgactggcaagaggattattaatgcaatggaatgaggaaaagccgatgaacatcctgatcattgggcgaaaatttgcagccatcagtgatgtgaaaacatatacggaaatgtggtcttataacctggcctgcgcctttagtgaggcaggggtaacaatgcaataccatcgtccatattcccctggcgtcgaaagccccgaggattatgttgaagctgtgttgactgctgcgacagcatgttctgcgaaggccattttggcaccaggattgaggtattttactacggatgatatatagcaaactcacaattagcccttatttagacagaatgctatatctaaaggaccataatgacaatgcgctaaatgaaatttgtggtgggtacgaatacattcaatctgccgatagttacagttggcgtgatgtaagtgaagagtatgcaaaagaatcatgcgaaaagcatatatataaagtatatcaatcgtttaagaaaaatgcatcaccattaataactaaaaacttccccggtttctacgaacgtgtccccccctgtgagaacgcagatgaatgcataaaaaaaacaaatatatactttgatgataactttctaaatatctacaaaagaagccaagatagagctcctcaaataatttctgatttaaaaaaacacaatatagaaagacattcatagcccaaacatgagctgttcctaagaaaaattgttgatcaggggtaattccttctatcgttttagcattcttgtactcttttgaacgctgaaacgctttatatgccaaaatcattccgcccagatctgcagctgcttcgccaacaaccaattgtccctgtacatgcagatcgccatctactacatattttgagaattgatcagcaatgcattgtgtcgcatttttgaattttgataaatcatttggcgcccaccaattttttaaatttccataaccatcaaattgagcaccttgatcatcaaatccatgcgtcatttcatgacctataacataccctattgctccataatttatggcagccggagcctttggatcaaaaaaggggggcgacagcgcgcccgactttcgcagctcgtccgtgtcgaaccggaggtgcggcggcggggggacgaccttggaggcgacggccttgaggccgcgggcgaggtgggacgaggtcgtcgcccattgcttgcggacggcgtggtgcgcctcgttctcatcgtcggcttcgtcggcggcggcggcagcagcctcctcgccagcaccgaccccagcactcgagcggctggagccagagcctgcgccggctggcgggctcgccgagcttcggccggcctcctcttcagccatgtcttgccggtcgtggtctgagggccgcgcgagaggtcgagcgtcagccgtctgtcggcaccaaggtgacgagacggagcaggaccccaacgtacgatcttgatagtattgaacgcttggttgcaagtcaacccgaattgactattagtctggaaggcgctattgatcagctgacccaaaattctgtaggcaatattcgtttagtgggtaatttttctgggaaaaatttacagaagtggatgccttatttgcctaaaaaacacatgaaagccaagttatttgcttggttaaataatgacatcaaacgtttagggcaagcaacaggcaagataactattaatggaatggcgaaggattttccatttgataatggcaatggggagttttctatagtaagccatgttgtcggcggagatattttaattactccagaatggagattgattaaagatttggaaggttatattaaactaaaaaatagaaatcttgacattgatagcctactggagggcaaggcttgatgccggtttccgacatcagcgtcgcgatggagctacgacgtcgacgccgtaggaagcgtaaccggatcattgcgggtgttgtcgccgctgtggtggtgctcgtccttgtggcgatgtggatcgtccgcagctcgtcgttgttgtgcgtcaacaccatcgaggtacacggcactcgccttgtgacggcgtcccaagtcgagcaagtcgccaagatcccgaagggtcagccgctggccagggtgaacaccgacgacgtagctgcgcgcgtaacgcgcatggatatcgtccaacaggctgaggtgtaccggaagtggccgcacactgtcgtcattgacatcaccgagttgaagatctcgtatcaggtgaagacgcctcataatcatgtaatgggataacagtttacgaacccgttatggctttatatgtgatctgaatctcattaattatgcaacgcgtgaaacttacatcaaaaatgcgcgacgcatcgcaaattttagcccattactgccagaataatcgggaaaaggaacggtgcgatcagcgaagtaataatcccgcataacaccagcgccagcgaactaaatgcaccttcctgataatccagctcggcgcagcgcgccgtaccgagggcgtgcgaggcagtccccattgccagaccgcgcgcagctttggtacgaatacgcatcgcattaagcaatgtatggccaaataccgcgccgaggatgccgacgaaaatcacgcaaactgcgctgattgccggaatgttgggaagatatagaggatttcggggaaacacatctcgatttcttgaagcaatatggtgattttgaaaatggtattcctgttcacgatactattgccagagttgtatcctgtatcagtcctgcaaaatttcacgagtgctttattaactggatgcgtgattgccattcatcaaatgataaagacgtcattgcaattgatggaaaaacgctccggcactcttatgacaagagtcgccgcaggggagcgattcatgtcattagtgcgttctcaacaatgcacagtctggtcatcgggcagatcaagacggataagaaatccaatgagatcacagctatccctgaacttcttaacatgctggatattaaaggaaaaatcatcacaactgatgcggttgggtgtgtttttttatttttggatgatgttagtaggtgatttcttattgttgatgatatgtttgttatgagattcgaattgagtattttcatttgttaacaatccatttttgcggtgttttttattgttttttttcttttgtttaagggtgtgtcggtgtaagtgtttattttatgggttaaagtaggataccaagtgtgaaaaaaaattaaaggttcttcttgagatcctttttttctgcgcgtaatctgctgcctgtaaacgaaaaaaccgccctgcaaggcggtttttcgaaggttcacagagctaccaactctttgagccgaggtaactggcttggaggagcgcagtcaccaaaacttgttctttcagtttagccttaacaggcggtaagagggaatgtccttctccgaactatagtgaacatttgtcggtattgaaaatgggattttcaattttttcatagtcccataaagatcatccgtcgaaggaggttgttgtttgtaaacaaaagattcatgttgagataagaattttggggagtagtcttcaggaatttgagtacaaatatgataatcatcaagatttctagaatattttagtctctttcctgcttttctagtatccccttgattcggttcagagctggtgggacgattcggcagatctcgacaaaattcaatttcccttttagttatgggtgaacccccttttaatctaagactgggggaaaatggatttatttgagaaggtacatcttttaagggcgaagagggaggtgcccccgcccgaccccgcacacagagaaagcccggacgaaatccctcttgctcctccgctcaaacattgccttctcggaattcggcacgcgccgccggcgctctcgggcggtgcacgacctcgtcctcgagggcttgctcgaagggcgggatgcgtatgcgcgcgcgcaaaagggcaagggggagggaggagagcggggcaggctggtcgggacgtcgaatgtcgacagggcgaggaggttcggcttggtgccggttggaacggtgcgttgctttctttgcttttccttcgttccccctcggctctccttgcgagctttgcagttgggcgttctcgtctccctgcccgctttgagagtcgcccccatcgcgctcaaccaaccctcaagagcgacgcctattatacaatacttacgtagcccatggtaaaaattctggagtcaatgttgccaggagtttttctaatagagagtccagcaaacaatccagcttaggtacctatatcaccaaaaacacctacatcggacacaaaggctactccttgaatctccagggtttggatagagggtttaatgataatgcatacaataggcgtgttgtgatacatggcgcgtggtatgttgaacctgactttatcaaaaaagctggccgtgctggtttatcctggggctgtccagctatagcacaaaccttagcaaaacccgtgatcaataccattaaaaacggttcggttgtatttgcttattaccccgataaaaagtttttatctcattcaggatatctggtctccacatccgctgagtacgacaccaacttttttcatcactcaagcctcatttcattacatcaactaattgattttttgattgacaaacactaatctacatcacacattttaatgattcttgtaacaaaccacgccgtatttgctatggtgtgttgccagaagatgggatttcaaaaacgcttgcgtaccaacaatatctgagattgaacgcaggtgtaccgctttccctggtgttggcgcataattcgcgcaccccgacctcggtcggggtcattttttttcagcctctgaaacccagtctttcaatacctgcacatcctgctgccagtcgtgtttcaactcgtcaatccactcctgtacgttgtcccaccatgccggtaatgtcgtggtctatcaatactctcagattcttcttgagtaatttgaatctgaattccaccagaaggtaaggcagactcgccttcggcaccctccgccaataattgcaaaaatgcttcaggattttgcgtaatagcttgagccaatgcaggatctccctgcccaatttgttgcaatatagtttccaacatctgtggattttgttgaacaatttgtcttagctgttgaaattgaggaatgctacgaaggaagcctagagggtcatcaccaacggtattagaaggttgttcttgattttcattttctgataaagcagcttgttcaaaaagattcgctggctggccagtggaagtaggagcaggggcttcgctttgctgttgctgagcagcaagggctgcagcacccgcagcgcccaggcgaggcgatctccgctttgaagagtagcgaccccccgcagcatcgaccacgccccccgcccgcctggactgcccgaagatggatcatgacgactgtacacgccctgccggtcgttcggcctgcccggctgcggatgggttaccgcaaagaggaacgggctgatcgcctaccgtcgggccccgtccgccggctgacatgtgctctcgacgctagcggctcgttgcaggactctgtggtcgtcgaggtgtcatgtctcgttgccagatcggggctgctcgtagcttatcgttacatcgccttcgggcgcccgcccaccagtctccttaccaacccatcgccccgccgccgccctcaccgccctcggcacggtcattgaccgtcgtactcggagacaggaccgccgaacgagccagggccggtcacgcgcaagtccgtgcgctggtgagagccagggacgaaaggctcgagcgcgacgcgagtgcgggggatggagccgagatggcgcgaaagcaggcctttgacgtgctcgtgccgagcgacacgccagaggggacgggccgagcaaacgtcgtcatgaccgacgacgttgggcagcgagcaatgtgagcagtggtcgtcctggccggggcagagcgtgcggatcgtgttgaacgacacggccttgcaggggacaaggcagtcgggtgaacgcttaagatacatgaggacttgcgccttgaaaattgctatgagggaggaagccgtaagggcaagagagtgatgttacggggggggggcccgcttatcggcccacgcggggccagcgagcgcacccggccatcttcgtccggatcgggcggccagcgtgaggaagggaggaggactcacgtcgtccctgacaaaccagtcagtcccctcctcgccctcagccaaggccgactttgcaagctcgacaaacgcctgcctgcctcctcctcccttactgaaggctcctccgccgagcggctgctggctcggggcgctgtcgaaggctcttgcgtcgcggtgcgggtgggggtgaaagttgagggtctttcgcgagtttgcgtgcgtgtgcgagtgcgaatgggcgagagcggtcagtgggaggagcgaggcgagggctgcgagagggagcatcgtaagagatgcgggtgggtgtccaggaggtaacatgaacgggtttaatgcaggaccgatgcgacagcccatcggccccggcgatgtcgacgggatggggttcggtcagctcaggttgaatgacaccgttccgtatggaggatcgactaccgctggagcttcggcggggtatctcgacgggtggcatgggcctcctcggccggcatatagcagttcgagctcgagtgccagttctgacgtcggttcgaccgggggttaccctcatgaatcgatgtatcgagcgggtggacccatgcctccgccccagtcgcaacttcaccaacacccgtacgcctcgcaacctcaaccacaaatgatgtacaacaatagcaacaacagtaacaatggcaacagcaacaacgggagcaatgtcgctggctgcttatcacgaagagatgcagcacaatatcgaccaggcgacgtccgatctgcgtgaaacgctggagcagatggaaattcagaacgttgagttagatctggcgaaaaagcgcgcccaggaagcggcgcgtattaaatccgagtttctggcaaatatgtcacacgagctgcgtacaccactgaatggtgttattggctttacccgcctgacgctgaaaacagaattaacaccaacgcagcgcgatcacctgaatacgattgaacgttcggcaaataatttgctggcaattattaatgatgttctcgacttctcgaaactggaagcaggtaagctgattctggaaagtattccattcccactacgcagcacgctggatgtttcataacttggtgatgtagatggtccaataacaacatgtaagtctttcaaatcaaagttcacatgttttagcacttcttttacaatttcagtataggtaccacgccaccctgcatgcgccaatgcaataaaatgatgttttgtactataaaaatatactggtacacagtctgcataacacatcgttaataagacattactatcatatgtgtacatcgcatcaataccatgaagcgcatcagttaaagtgtctatatttgtgcctatatcatcctttgttatacaagcgactttattttcatgtgtttggatgggaaacacccaattttttctatcaaacgcaatttcttcagctaattgcaattgatgttgagtaatattatatttacaatataacgaaatacaagtcaaattctccacagcccaaaatatcgttaacacagatactgtcagcaataccacacttatgatacactacgttgcgtatcactacatttcctatgttaagatattacttaagatccgtttactgataaatgcggatagactgcccttcaatatacatgataaacgttgatatcagctatcaagaaggttacaaatagagctaccactgaatctcgttcctcagttcagttattagctatatcggtgaccaatactaatagactttttataacaataaacatacattgttagttaacataccacataccgctacattgtagatcgcaagtaaaaactcaccgcagttctatttatcgttaaaacagtaataaatacatccagtttccaatctggttatttacctatatttttcgcggtacgccgctgtatgttcagttgctggtgttctattccggcatgtacacgcttgagattgttaagggaaccgaattccttaacgctttcttccgcagtggcctgaactgtaccgtgctggcgctgacgcttaacacctgcgcttacactaccgagatttttgctggggcaatccgttcggttccgcatggggaaattgaagccgccagagcctatggcttctcgacttttaaaatgtatcgctgcattattttgccttctgcgctgcgtattgcgttaccggcatacagcaacgaagtgatcctgatgctgcactctactgcgttggcatttacgaatgagggggacggacccagtcatctcctcccgcgctaggccagcgacggccgtcctggtagtctggctgcctcctctgttgctgctgctgttgctgttgctgttgctgttgctgttgctggtcggcccaggcctgctgctgttgaccattcttgccaggcccgacgtcgatcgacggccctcttgcggcagcagggccggccagctgccggctctttggccgcgacgtcgagacggggacgaacgactggctcggccggcccggtcctgctgccggcgctgccactcctgccggggcgtagtgcgtgcccgcgaccgagggcggggcggacggcggtggaccgaggtagggctcctgcagcccggaagagggcgggagagggaaggtaaagcgtgttacgttcgatgaagcgtaaccctaacttccggcgccgccgcgcgggcgggcgctgcagcgcgccggcgctggcgaccctcccgcaaaactaccacgacgctcttccttcaacatctcggtcggcccgtcagcggcggtgagccggttggtcgtcgcagccaggagctgggcgtcctcgatgagggacttagcgacgtagctgagggtgaggggcaggggctggccgacggcatccttcccgacctgggtccgaatggatgacttgagcatttcggccgcgggcgtagctggcagcgtgcgcaggagcaggtacccgaagaggaggtcgaggtccttgagctccccgccgatccggcggatggcgttgatctttcccgcataatttggatgagattcagggaaaaagcttttggcgtttggcatgactgcaacagagcagttcaacgaattcgccaactccaagaatgcgctctcagctttaaagcttcgaagtttaggtccggccaacaatacgggcttttgctttccatttacgattttggcgctaatgtcaacggccatttgcaaatattcttgattgctggtttcaggctcggtaatcaagctggctggtcccggcgctgcacaaggttgagaagcaacattcgtaggaacttcaatgtaaacaggcttctttttcaataaagccattttaattgcatagtcaattagtcgaggtgcctcagtcggcctttgaatagataccgcagcacagtagcggagagagacaccggccgtgccatgtactctcacgcacgtctctcgagcggaggacgggcgaccctccgtccttccagggacgaggatacctactccctcccaagcgcctccgacctccccccctctctggctctgctctcactttctctctccgctaccttactcccccccatccctgatcgacccggtctaaggcgcccgcatcgcgcgtactgggaatggtgcgccgccctcgctcgcccacgtccgcctttcatctgcgtctcctcggagggctcgcggggactcgcgagtcgcacaaacgacgtttgcaaccccgagtatcacgcgcgagccatcgttctgcctgtccctctctctcgcttcaccctcctcctcacgaaagtcgcctgaatattgagagtacagtaggaaaaggaacacgtttcagttttgttatcccggaacgtttaattgccaaaaacagcgattaatccgcctttgtcatcttttattgccataagccagccgatgctggcttattttctttgcagtcaaaatacgggcgttagattttacaacggttggtgattttttgttcgcatgattagccatgtctttttcacggaaatagtgttttatactggttggtgatttcttatcgctatatacctctggtttttagatccctccttgctttaaaacgttataagcgtttaaattgcgcttcaggtgctgtcatactgactgcattaacgcggtaaatcgaaaaactattcctggtgaccagcaccaacgacaactgcctcggcagcgactgcccacacttcaaggcgtgctttgtggtgaaggcgcgccgacgggcgatggatgccgatgtggtggtggtgaaccatcatctttatctggcggatatggtggtcaaggagagcggatttgccgaactgatccccgacagcgacgtggtgatatttgacgaagcccaccagatcccggacatcgccagccagtacttcggccagcagctctccagccgccagttgctggacctcgccaaagatatcgtgattgcttaccgtaccgaagtgcgggacgccagccagctacagaaaagcgcggatcgcctgagccagagtacccaggatttccggctggcgctgcgtagaagctggccgtggtctgtgggaattccgcctggctgaaggcgaagagttcactgtaggtcagagcattagcgttgaactgtttgctgacgttaaaaaagttgacgtaactggcacctctaaaggtaaaggtttcgcaggtaccgttaagcgctggaacttccgtacccaggacgctactcacggtaactccttgtctcaccgcgttccgggttctatcggtcagaaccagactccgggcaaagtgttcaaaggcaagaaaatggcaggtcagatgggtaacgaacgtgtaaccgttcagagccttgacgtagtacgcgttgacgctgagcgcaacctgctgctggttaaaggtgctgtcccgggtgcaaccggtagagacgaacagcggcgtcggcgtgtcgtacgcccagcgaccagcgcggtagagggccggagcatgctgcgacagggccttggcgagcgaccgacggtcgagcgagttgaaggcgttggcaaagtcgagcgaggtaacgtgggtgaacggcttggggaggttgccatcgagggcccgctcgagcgcgcgcgtaatgggctctgtgccgccgctggagccgacgccgaactggaagggcagcaactgggacggagctgagtagtgacgaacgagggccttggtgaccagccggtacaggagctcgccaaccgcgatcggccggatgccgccgtcggccttgaggagcggcgtgagcctcgacgcgcaaaggagctgctggccaggcggcagcaccccggtcgtcggctcagccgctcgcagctcctcgtgaccggcctcttcgggtgcgtctgcggtgctctcgccatcagtaccgccggcatcaagacgcaccaaggcaagaccaagtgctcaggctgggcttgtcggcaatccacccctccgacgtcgttttccgccccagccgcctcgtctcggctcgcatcctcggccgtcgctcctcgtcgcgcgcctacggtctcgcagccggctcgacgtcgggcctccctcttgtcgtcgtcgtcgtcgtcgtcgaccagctcctcaaacggtcggcctgtctcgccaccggtcgtcgccacaccagctcgtcgtccggcccgtcctcgtgccctctcggtatcgtctcacgaccccctccttccggagccatctggaacgcgtcttcgctctctcgcgtctcctctgccgagcccgctcgtgagcttgacgagatgaaagcgagcgaggaagaggcgagggagggcctctgtttggcgagctccccggccgcgtcaaggtcgtcgtcgcccccgcaggcggccgctcggccgagggcgcgcgcgcaggctgacggagagcaagcagtgcccgaccgctcgctcgctgtgtgggattgtgtggacgggaagggcgacggaggaagaggagacggacgcaccgtggatggcgacgagcttgaggaggagggcgtcctcctcgggcgtccagaagacgcgttcgcggtacgacgccccgcccttggacctccccctcctcctccctcgtcaccccccgctcgccttcgctctcgcttcgcagcaagcccgcgcccagcagatccgccatcaagccgcgctcaatctcgcctcgtcgggcaagtccaagtccgaggtcgcccgtctgttgaagcatggcgtcgggcctgcggtcgagctgatggagagcaaaggctatgagggctggaagcctgcgggcgaggaggcgaaagagtagaggagggcttgtgctgaaggtcgattcttgcgtcgctccccccttctccgcctggacggcgctcgacccgacccgactaccgctcccgccgcccgcccgtctgccaaaagcaacctcggccgtcggtcggtcggtcgttcggtcgtcgccgctcctccgacaggatgtacacgtcgtcgaggtaggcgagcaaggcgtggcccgggccgaggttccgttcgagagcggcgagggtgttgcgcgcgccgatcgaaaagagcagagggccgagagggtcaccttggcggacgccttcgctttgtaggacgagacaggaggcagggccgactcagtctcaggactactccgtgaacgactcatggatcccacctgtaggacgagacaggaggcagggccgactcagtctcaggactactccgtgaacgactgaggtttaggagggggagcgagcggtcgtctagctaagaggagggagcgaaaagagagaggaggaaagagtccggcggactccagggcgtggcgcccagaccggaccgacggggtgcttggaggcaagagcggcaatggtggccggcgtgaggtcggcgacggacgagtcctcagcgagcaggcgagcggctcgactgagcttgccgtgctggacggcgatggcgatccgacgaggcagcgatgactcggacggccgagcgaccgagggagacggccagtcgacggcaggaaacgcggcgagatgggctttgccggcggcaggcgagacggacgtcgcgagctcgagcgccggagctaggcctaccttgggcagcgcgaggaagtcgaacagccgagcctcggttggttcctcgatgtaggccttagcgagcgagccagcgacgagggcgaacggcttggaccaagcgaaagcccatgtcgaacaggccgcactagaggtcatcttctcgggtcaggctgaagaggcgtcgtcgaacccaacggcgtcgtcctcgttggctcgagcggccgacgcgccggccacgtcctcatccaccggcctgccctactcgcgatttgaaatcgacgactcggatcagatcctgatcgcgatcttttcgttcgtcggccggtccggcctcgcgagtgccgcgcgcgtcagccgcaagtgggacgagatggtcgagtgtcagcggggcgtctgggtcgcccggctcaaggacgagggcctctggtgggggctcggcgccgaagaggaggaggaggagaaggtccgccggcgctgggaggtccgcgaccgggtcggcagagccgatcggatcacggccagcgagggtcgccgcagacacgacggcaacgtcgtactcggagacaggaccgccgaacgagccagggccggtcacgcgcaagtccgtgcgctggtgggaaccagggacaaaaggctcgagcgcgacgcgagtgcgggggatggagccgagatgacgcgagagcaggcctttgacgtgctcgtgccgagcgacacgccagaggggacgagctgagcaaacgtcgtcatggccgacgacgttgggaagcgagcaatgtgagcagtggtcgtcctggccggggcagagcgtgcgaatcgacaggccagcggcgacctcggccgacgtcagacgcaggttggcctcggcccgggccacgccttgctcgcctacctcgacgacgtgtacatcctgtcggaggagcccggcgcgctggactcggttgccgccttcttcgacggacaccccgcgtgcgggcttgcgctcaacttgcgcaagtgtcacgagacgccgctcgccatcgtcgctcaggacggcctcgaagtcctcggcacctgcgtcggccctcctgatgttcgagccgccttcctcgcttccaaagtcgaggcccagctgccggccctctcgcggctttccgacctgcccggccaagaagctctcctcgtcttgcgtcactgcttggcgagcaacctccgtcatctgcagcgctcccttcggacggagggccctcaagcgccggagggctccggtccctcaatcgccggagggctccccaaacgcaccgcctacaccgcccccaagccgacaccacgaggttcccatagggcgttgtaaacgattggccggaaccatagtctggttctggcccacgcttacgagacgctgctcaggtacccttcggcggcagtgcaaaccgggcagcccaccccggggcctggtgacccagacccacagggtggaccgcccagcgtgcactgtaccaaggttcccatgaggcgttgtaaacgattggccggaaccatagtctggttctggcccacgcttacgagacgctgctcaggtacccttcggcggcaacgtcgtactcggagacaggaccgccgaacgagccagggccggtcacgcgcaagtccgtgcgctggtgagagcccgggacgaaaggctcgagcgcgacgcgagtgcgggggatggagccgagatgacgcgagagcagacccttgacgtgctcgtgccgagcgacacgccagagcgggcgagccgagcaaacgtcgtcatggccgacgacgttgggcagcgagcaatgtgagcagtggtcgtcctggccggggcagagcgtgcgaatcgacaggccagcggcgacctcggccgacgtcagacgcaggttggcagcgaacgggatggccgacatccagcgccgggctcgctttttcgccttctaagttgcgctcccttcctctgcttccgtctcctcccctcgtctaactctcaaactcctcgcctcccgtccatagacccgcctttgtcattgcatgcccgttacaccctaaccctacctttgtcattgcatgcccgttacaccctaaccctaaaagggctcggtcaccagtggctcccactgtagctcggctcgcacccaccgccatggcaccggttgcttgccccctctgcagcaacccgtacgtcaacctgctcgagcacctcaagcggcagcaccccggtcgtcggctcagccgctcgcagctcctcgtgaccggcctcttcgcgaggaaggcagctcgaacgtcaggagggccgatgcaagtcccgaggacctcgaggccgttggcggcaaccgaggcaagcgacgactcctggcatttggcgacgttgagcgacaggccggcgtcgttaccgtcgaggaaggcaacgaccgactcgagcgctcctgcttcggtcgagagcacgtagatgtcgtcgaggtaggcgagaacggcatgtgagtcgccgaggtcggcctgaagggcctcgaccgtgttgcggatgccgatcgagaacagaagcgggccgagagggtcgccttgacggacgccctggctggactcgagcgcggtgaccgagccgtcggcctcggcccgggccacgccttgctcgcctacctcgacgacgtgtacatcctgtcggaggagcccggcgcgctggactcggtcgccgccttcttcgacggacaccccgcgtgcgggcttgcgctcaacctgcgcaagtgtcacgagacgccgctcgctatcgtcgctcaggacggcctcgaggtcctcggcacctgcgtcggccctgccgatgtccgagccgccttccttgctgccaaagtcgaggcccagctgccggccctctcgcggctttccgacctgcctggccaagaagctctcctcgtcttgcgtcactgcttggcgagcaacctccgtcatctgccctacacccacctcgtctcgctcgacttcaccaacgccttcaacaccgtcgaccgtcgcgaccttgccgcagggctccgcgactttgctccggctctctatcgtgccggtcgatggatctacggctcacccgctcagctcgccgtcaccggtgccgatggggcggtcgacgtactcgagtcatcgcaaggggttcggcaaggcgacccgttcggcccgctcttcttctcggtcgccatccgtcggacgctggacgacctcgttcgacacctcggccctgaccgattactactggcctacttggacgacatctatgttctctcgtcggacgaccaggcctcaggcttcgtcgacggcccttctcgcctgctgagcgggctgaagcctgacctcggagcgagcctcacgccggcgagctgcgtcgccgcgtgcgtcgccaagggctttgcgtacgccggcgtccagaacggcaacggttcgtgtccggcccggaggctgcctactttagccgagcagagggcgcagagcgctgactggcttccctgctccctcccttcctgcttccttctcgctctctctactctactcgaacgacggccgatggcgactggcagagtgctactgcgggccgtcgctcaacctctctggcgagatcgggaccaaggcggccgactcaggttacggaaggaggtaaagcgtgttacgttcgatgaagcgtaaccctaacttccggcgccgccgcgcgggcggccgccgccgcgcgggcgggcgctgcagcgcgccggcgctggcgaccctcccccagaactaccacgacgctcttccttcaacagcattcacggtcaaggatctaggcgagatgcgcttctgcctcggcatcgaggtcgtgcgcgatcggtcgcgaaggacgctccaggtctcccagcggccctacatcgagcacctcgccgccaagtaccacatgacgtcgccccacccggtcgtcatcccactcgaccccagcctggtcctgaacctcgacgacgtgtacatcctgtcggaggagcccggcgcgctggactcggttgccaccttcttcgacgaacgtcccgcgtgcgggcttgcgctcaacctgcgcaagtgtcacgagacgccgctcgctatcgtcgctcaggacggcctcgaggtcctcggcacctgcgtcggccctcctgatgttcgagccgccttccttgcttccaaagtcgaggcccagctgccggccctctcgcggctttccgacctgcccggccaagaggctctcctcgtcttgcgtcactgcttggcgagcaacctccgtcatctgcagcgctcccttcggacggctctcgcgtggtccaagccattcgccctcgttgctggctcgctcgctaaggcctacatcgaggaaccaaccgaggctcggctgttcgacttcctcgcgctgcccaaggtaggcctagctccggcgctggagctcgcgacgtccgtctcgcctgccgccggcaaagcccatctcgccgcgtttcctgccgtcgactggccgtctccctcggtcgctcggccgtcggagtcatcgctgcctcgtcggattgccatcgccgtccagcacggcaagctcagtcgagccgctcgcctgctcgccgaggactcgtccgtcgccgacctcacgccggatgccccgctatggtctcttctctcgcctcctctcgctctctctgctccgtgcccgtgctcgcttcttcgccttttaggcgaagccccttagccacttgaactccttctcgcctccaatgtaccaccatctatagcgcctctgaccctctgctcccatcgcatgccccgttaaaccctaaccctcgtctcgcttgacttcgccaacgcctttaacaccgtcgaccgtcgcgacctcgccgcaggactccgcgactttgcccctgccttctaccgcgccggccgatggatctacggctcgtcgtccaagctcgcggtcaccggtgccgaacgtgcccgtttgtcccatcgttgttggtcctggagggcaccggcgccctgcgacaggaccgtggtagctccctcgagagggacggtcatcggccaccgtctgagcccgatcgggttgacccatgtcttttagggttaggttagggtttaacggggcatgcgatgggagcagagggtcagaggcgctatagacggcggtacattggaggcgagaaggagttcaagtggctaaggggcttcgcctaaaaggcgaagaagcgagcacgggcacggagcagagaaagggagaggagacgagagaagagaccatagcgaggcataagcgccggtcgaggaaggcagcgcgaacgtcaggagggccgatacaagtcccgaggacctcgaggccgttggcggcaaccgaggtaagcgacgactcctggcatttggcgacgttgagcgacaggccggcgtcgttgccgtcgaggaaggcaatgaccgactcgagcgctccggcctcggtcgaggttcttttagggttagggtgtaacgggcatgcaatgacaaaggcgggtctatggacgggaggcgaggagtttgagagttagacgaggggaggagacggaagcagaggaagggagcgcaacttagaaggcgaaaaagcgagtcgccttctaagttgcgctcccttcctctgcttccgtctcctcccctcgtctaactctcaaactcctcgcctcccgtccatagacccgcctttgtcattgcatgcccgttacaccctaaccctaaaagaaccctgctatctgcgactatcgtttggttgccatcggcgttgtggctcggtcaccagtggctcccactgtagctcggctcgcacccaccgccatggcaccggttgcttgccccctctgcagcaacccgtacgtcaacctgctcgagcacctcaagcggcagcaccccggtcgtcggctcagccgctcgcagctgctcgctttttcgccttctaagttgcgctcccttcctctgcttccgtctcctcccctcgtctaactctcaaactcctcgcctcccgtccatagacccgcctttgtcattgcatgcccgttacaccccaacccaaactcctagcctcccgtccatagacccgcctttgtcattgcatgcccgttacaccctaaaagccttttaggcgaagccccttagccacttgaactccttctcgcctccaatgtaccaccgtctatagcgcctctgaccctgtgctcccatcgcatgccccgttaaaccctaaccctaaaagagccttccaggctgcccagtcggtcgcctcggttgctgctgcctcggccgcgtcgctcctgaacatccaggccgtccagtcgcaggcttcggttgctgccgccagcgctgcctcgcttttgaacgtccaggccgcgcagtcggtcgcctcggttgccgccgcctcggtcgcctcgctcgccaacgttcaggctattcagtcgcaggcttcggttgcccaggcttcgctcgcctcggtcctctcggttcagggactcgcctcgcaggcttcggttgccgcccagtcggtcgccgccatcgcctctgcctcggctgcctcgctccgtcgtacggtctcttctcccgcctcctctccctctcacttctccgggcgcgtgctcgctttttcgccttctaagttgcgctcccttcctctgcttccgtctcctcctctcgtctaactctcgaactcctggcctcccgttcatagacccgccttcgtcattgcatgcccgttacaccccatacgagccgaagagtgtgcggtcattgacgcacgtctgggagcagccgctgtcgagcaagaagcagcgctccggggccggcgggacgtacggccacttggagtccaagcaaggcctttcgtcgtcggcgaccggccgggctcctccgacaggatgtacacgtcgtcgaggtaggcgagcaaggcgtggcccgggccgaggtgccgttcgagagcggcgagggtgttgcgcgcgccgatcgagaagagcagagggccgagaggatcgccttggcggacgccttcgcttgaggtaaggacgaccggagcgtcgccgccgatggctgagacgacaagcggggtcgggacgtcgtacgcccagcggccggcgcggaacagggcgggcgcatgctggaggagacccttgccgagctcgactcgagacaacgagttgaaggcgttgctgaagtcgagtcagtcgtattgtggctgatggtcttgtggtactcgcagtacctcttggacttcgcccggccggcgccgccgtccttgaagccgaacttggcccggtcggggcaattgagggcgaagtggccggggtcgccgcagatgaagcaggcagtcgtggccgacggcgtgagggcgagagccgagtgggtctcgtgttgaacgacacggccttgcaggggacaaggcagtcgggtgaacgcttaagatacatgaggacttgcgccttgaaaattgctatgagggaggaagccgtaagggcaagagagtgatgttacgggttcgctgccaacctgcgtctgacgtcggccgaggtcgccgctggcctgtcgattcgcacgctctgccccggccaggacgaccactgctcgcattgctcgctgcccaacgtcgtcggccatgacgacgtttgctcggcccgtcccctttggcgtgtcgctcggcacgagcacgtcaagggtctaatctcgcgccatctcggctccatcccccgcactcgcgtcgcgctcgagcctttcgtccctggctcccaccagcgcacggacttgcgcgtgaccggccctggctcgttcggcggtcctgtctccgagtaacgcttaagatacatgaggacttgcgccttgaaaattgctatgagggaggaagccgtaagggcaagagagtgatgttacggaaggaggtaaagcgtgttacgttcgatgaagcgtaaccctaacttcggcgccgccgcgcgggcgggcgctgcagcgcgccggcgccggcgaccctcccccagaactaccacgacgctcttccttcaacactcccactcgtcgtggtgacctcccctcgacccatccagcgctggaaagggtgccggcggccaagagccagcagacccggaggaactgggcggtcgagctatatttaaagaagagctcgtacgaaagtacgggcttttttttcgtatattgcacacaccggggggatgagaagccccgaccggggttcgacaactggcgacagccagttggacagaccgtgaacgcagtgagcgggctgcccgcagggcgagcgaagcgagtcaatccccccctcaccgccatatttaaagaagagctcgtacgaaagtacgggcttttttttcgtatattgcacacaccggggggatgagaagccccgaccggggttcgacaactggcgacagccagttggacagaccgtgaacgcatcggtcgagagcacgtagatgtcgtcgaggtaggcgagaacggcgtgcgagtcgccgaggtcggcctgaagggcctcgacggtgttgcggatgccgagcgagaacagaagcgggccgagagggtcgccttgacggacgccctggctagactcgagcgcggtgaccgagccgtcggcgtcggagacgaacagcggcgtcggcgtgtcgtacgcccagcgaccagcgcggtagagggccggagcatgctgcgacagggccttggcgagcgaccgacggtcgagcgagttgaaggcgttggcaaagtcgagtactcgtttgagggattgcaggtcggctggttttggcggggcgtttcgacctcgtcggcccttccgcccaaccatcaccctctcccgcagcgtccgaccccgccaggctctcgacctcactatcctcggcactctccgtctcatcctccgagatgacaactggatggcccctctgagtgccttttagggtgtaacgggcatgcaatgacaaaggcgggtctatggacgggaggcgaggagtttgagagttagacgaggggaggagacggaagcagaggaagggagcgcaacttagaaggcgaaaaagcccagcggccacccgggcgccacgccctggagtccgccggactctttcctcctctctcttttcgctccctcctcttagctagacgaccgctcgctccccctcctaaacctcagtcgttcacggagtagtcctgagactgaggtacgttcgccccccctagtctagcacccctttagcctaggtagtagctcacccccactgtagtcggccctgcctcctgtctcgtcctacaggtgggatccatgagtcgttcacggagtagtcctgagactgagtcggccctgcctcctgtctcgtcctacactaagttgcgctcccttcctctgcttccgtctcctcccctcgtctaactctcaaactcctcgcctcccgtccatagacccgcctttgtcattgcatgcccgttacaccctaaccctaaccctaacccaatactaaccccaatacctaataccaatacccctaaccctaataccctaacgtcactactcggctccgtcccagttgctgcccttccagttcggcgtcggctccagcggcggtacagagcccatcacgcgcgcgctcgagcgggccctcgatggcaacctccccaagccgttcaccctgatcggcttgaaggtcgagcgagaccgggcccggcggcggatcgaggtcggccaggagcacaaggtcaaggagctgctcgaacgatggggcatgtcagagtccaagccaaacaaggtgccgctcccagccaagaccagcttgcccgccctcgacgccgcctcgcccgaccggcttcctccggccgaagtgacgacttaccagtccctgttgggctccgtcaactacctgtcggtcatgacgaggcccgacatcacccaggccgttaactatctctcccgcttccaggcccatcctggagcggaggtaaagcgtgttacgttcgatgaagcgtaaccctaacttccggcgccgccgcgcgggcgggcgctgcagcgcgccggcgctggcgaccctcccgcaaaactaccacgacgctcttccttcaacatatagcgcctctgaccctctgctcccatcgcatgccccgttaaaccctagggttagggtgtaacgggcatgcaatgacaaaggcgggtctatggacgggaggcgaggagtttgagagttagacgaggggaggagacggaagcagaggaagggagcgcaacttagaaggcgaaacagcgctcgcttcgaacggacgaccttgactcgccctggctcacgctcgacaacgcgctgctcgagcgactgctcctcatccgcggctcacctcgtcgtcttgcatcggacgccggcctcgcgacgctgcctgctcgcctcggaggcatgggcctactgtcgcacgccgagtgctcgccgcacgcccgggccgccatggccgagtctgccgaccttctcgtcgacgctgccctctccccggccaacaaccccgacccggacgcggcccccgtcatcgtctcccagcgcgctcgctgccatttttcgccttctaagttgcgctcccttcctctgcttccgtctcctcccctcgtctaactctcaaactcctcgcctcccgtccatagacccgcctttgtcattgcatgcccgttacaccctaacccttgtgctcgctcttatgtctccatcttggagcacatgaagagagggcacccgggacgacgcctgactgcagctcagctggcgttgacgggcttgcatggctgtctttgcggtgccttggccatctcggtggccggcatcaagacacaccaaggcaagtcaaaatgcgctggctgcgccgagaagtgccggacgagcgacttggagacaagccggtagaggagctcgccgacggcgataggccggatgccgccgtccgacttgagcagaggcgtgagccgagacgtgcagagaagttgctggccgggtgccgtgccttgtgcgacgtgccgtgtgagaaggagcacgaaggcggcgacgtccgggtcggcgagcgcatggccgagcaggggcggggtccatcccgagacacccggggccgtgtcgggcttgaaggccgcgaagcagtccttgatgagggccagctcgggcaagctgaaggaagacggagcggaagagacgcggaagagagaggagccaatgagaaagaagagagatgaaacgagcggcggaagagcgcaaccgtggctagaccgaccgagcgaccgacatcctgaaccttttagggttagggtgtaacggggcatgcgatgggagctgagggtcagaggcgctatagacggtgttacattgaaggcgagaaggagttcaagtggctaagggatttcgcctagaaggcgaagaagcgagcacgggcacggagcagagagagcgagaggaggcgagacctcgcgacgctgcctgctcgcctcggaggcatgggcctactgtcgcacgccgagtgctcgccgcacgcccgggccgccatggccgagtctgccgatcttctcgtcgacgctgccctctccccggccaacaaccccgacccggacgcggccctcgtcatcgtctctcagcgcgctcgctgccaggccgccttcgccacccgtcgcgaggctctactctgtgcgttgcctgcgtcctctgccaccaccatccttgacaactcctccccggtggcaagacgctggcttgctgtgaagggccgtcgacgaagcctgaggcggacagaggtaacagtcagcctcgcgaccgagagcgcccggcagacgactgtgggccaggagcaagagcgagggcaggggacgtacagccttgcgccgtccagtccgaggggagtgtctgcgatgcaggcgccgaggcgctcttgtagagctggagccggtacgagccgccacacatctgcgacttgtcgcccgtgcaggcgacctggcagcctgagtcggccgccttggtcccgatctcgccagagaggttgagcgacggcccgcaggggcgatgggcgaggcgttgtcgaggacgacagctcggtcagtcgagggcagggcggccaggagggactcgcgacgcttgacgaaggccgtctggcaccgggcccgctgcgacgtcggctggacgacttcgtcctcggcctcggcaagatcgtcggcatcggcaagggttagggttagggtgtaacgggcatgcaatgacaaaggcgggtctatggacgggaggcgaggagtttgagagttagacgaggggaggagacggaagcagaggaagggagcgcaacttagaaggcccgctcgcctgctcgctgaggactcgtccgttgccgacctcacgccggccaccattgccgctcttgcctccaagcaccccgttggtccggtctcgcccttcggccctcggtcaggcgcggctccgtcttctttgccgtcgctcgacctcatcaggcagtgcttcgactcgttcaagcctgacacggcccctggcgtttccggttggacggccccgctcctcggccacgctctgggcaacgccaacgtctcggccttcgttctgctcctcacacggcaggtcgcccagggcatcgcctgctcgccgaggactcgtccgtcgccgacctcacgccggccaccattgccgctcttgcctccaagcaccccgtcggtccggtctcgcccttcggccctcggtcaggcgcggctccgtcgtctctgccgtcgctcgacctcatcaggcagtgctttgactcgttcaagcctgacacggcccctggcgtttccggttggacggcctcgctcctcggccacgctctgggcaacgccgacgtctcggccttcgtcctgctcctcacacggcaggtcgcccagggaattccctgggcgacctgccgtgtgaggagcaggacgaaggccgagacgtcggcgttgcccagagcgtggccgaggagcgaggccgtccaaccggaaacgccaggggccgtgtcaggcttgaacgagtcgaagcactgcctgatgaggtcgagcgacggcaaagaagacggagccgcgcctgaccgagggccgaagggcgagaccggaccgacggggtgcttggaggcaagagcggcaatggtggccggcgtgaggtcggcgacggacgagtcctcggcgagcaggcgaccggggagagagcagcgtcgacgagaaggtcggcagactcggccatggcggcccgggcgtgcggcgagcactcggcgtgcgacagtaggcccatgcctccgaggcgagcaggcagcgtcgcgaggccggcgtccgatgcaagacgacgaggtgagccgcggatgaggagcagtcgctcgagcagcgcgttgtcgagcgtgagccagggcgagtcaaggtcgtccgttcgaagcgagcgctgaaggtgccggaggttggcctgcaagcattggcggagcagtaagagctcgctttttcgccttctaagttgcgctcccttcctctgcttccgtctcctcccctcgtctaactctcaaactcctcgcctcccgtccatagacccgcctttgtcattgcatgcccgttacaccctagtggctcccactgtagctcggctcgcacccaccgccatggcaccggttgcttgccccctctgcagcaacccgtacgtcaacctgctcgagcacctcaagcggcagcaccccggtcgtcggctcagccgctcgcagctcctcgtgaccggcctcttcggctccgagggggtctggacgtaagctcgggcacatgaagcagcagccgcgacaaaaggcttagcccaagagggtggcagcggtttgtagacggtagcgcaactggccagcgaagcgaaccgttcgatgaaaccctctggtgcgggggacggcaattgttcagggtcggccgcccgcgactgggaagaggccgcctctgctctcctcccgttgttggagcccgaggttgagggcccgcccgccgacgtgcccgtttgtcccatcgttgttggtcctggagggcatcgcggccttcaagcccgacacggccccgggtgtctcgggatggaccccgcccctgctcggccatgcgctcgccgacccggacgtcgccgcctttgtgctccttctcacacggcacgtcgcacaaggcacggcacccggacagcagctcctttgcacgtcccggcttacgcctctgctcaagtcggacggcggcatccggcctatcgccgtcggcgagctcctctaccggcttgtctccaagtcgctcgtccggcacttctcggcgccctcccagctccgcacatgaagcagcagccgcgacaaaaggcttagcccaagagggtggcagcggtttgtagacggtagcgcaactggccagcgaagcgaagcgttcgatcagaccctctggtgcgggggacggcgatccttcagggtcggccgtccgcgactgggaagaggccgcctccgctctcctcccgttgttggagcccgaggttgagggcccgcccgccgacgtgcccgtttgtcccatcgttgttggtcctggagggcaccggcgccctgcgacaggaccgtgagcgacttggagacaagccggtagaggagctcgccgacggcgataggccggatgccgccgtccgacttgagcagaggcgtaagccgggacgtgcagaggagctgctggccgggtgccgtgccttgtgcgacgtgccgtgtgagaaggagtacgaaggcggcgacgtccgggtcggcgagcgcatggccgagcaggggcggggtccatcccgagacacccggggccgtgtcgggcttgaaggccgcgaagcagtccttgatgagggccagctcgggcattgtcgcctcacccacgagctcggtcagctcggacggctcgctgctcgtcgttcggcccgccgctgctcgtcgtcgtgcctcggtcggcggtgctcgacctgtcgtcccctcggcctcacacacccctcaggtcgagcctcctgtaactctcgtcgaccggttcgccaccctggcagcctgccggaccgtccacaagccgctccctctcgcgtggtccaagccattcgccctcgttgctggctcgctcgctaaggcctacatcgaggaaccaaccgttcgtccctggctcccaccagcgcacggacttgcgcgtgaccggccctggctcgttcggcggtcctgtctccgagtacgacgttgccgtcgtgtctgcggcgaccctcgctggccgtgatccgatcgcctctgccgaccttgccggccttccgtcgtcgctgctgcctgctggtgtctctgccgacgctgcgccgcgtactgcttgcgcctctggttctctcctcaaccaactcacttcaaccgagaaccaaaagcgctcgaagtacggcgccgagaagtgccggacgagcgacttggagacaagccggtagaggagctcgccgacggcgataggccggatgccgccgtccgacttgagcagaggcgtaagccgggacgtgcagaggagctgctgtccgggtgccgacccttgtgcgacgtgccgtgtgagaaggagcacgaaagcggcgacgtccgggtcggcgagcgcatggccgagcaggggcggggtccatcccgagacacccggggccgtgtcgggcttgaaggccgcgagcgccgagaagtgccggacgagcgacttggagacaagccggtagaggagctcgccgacggcgataggccggatgccgccgtccgacttgagcagaggcgtgagccgagacgtgcagagaagttgctgtccgggtgccgtgccttgtgcgacgtgccgtgtgataaggagcacgaaagcggcgacgtccgggtcggcgagcgcatggccgagcaggggcggggtccatcccgagacacccggggccgtgtcgggcttgaaggccgcgaaagcgacgactcctggcatttggcgacgttgagcgacaggccggcgtcgttgccgtcgaggaaggcaatgaccgactcgagcgctccggcctcggtcgagagcacgtagatgtcgtcgaggtaggcgagaacggcatgtgagtcgccgaggtcggcctgaagggcctcgacggtgttgcggatgccgagcgagaacagaagcgggccaagagggtcgccttgacggacgccctggctggactcgagcgcggtgaccgagccgtcggaagcgacgactcctggcatttggcgacgttgagcgacaggccggcgtcgttgccgtcgaggaaggcaatgaccgactcgagcgctccggcctcggtcgagagcacgtagatgtcgtcgaggtaggcgagaacggcgtgcgagtcgccgaggtcggcctgaagggcctcgacggtgttgcggatgccgagcgagaacagaagcgggccaagagggtcgccttgacggacgccctggctggactcgagcgcggtgaccgagccgtcggccgccgaagggtacctgagcagcgtctcgtaagcgtgggccagaaccagactatggttccggccaatcgtttacaacgcctcatgggaaccttggtacagtgcacgctgggcggtccaccctgtgggtctgggtcaccaggccccggggtgggctgcccggtttgcactgccgccgaagggtacctgagcagcgtcgtaagcgtgggccagaaccagactatggttccggccaatcgtttacaacgcctcatgggaaccttgggtcgagatgacgatcgggtggaagggagacgacgtccggccgtcgtacttcgagcgcttctggttctcggttgaagtgagttggttgaggagagaaccagaggcgcaagcagtacgcggcgcagcgttggcagacacaccagcaggcagcagcgacgacggaaggccggcaaggtcggcagagccgatcggatcacggccagcgagggtcgccgcagacacgacggcaacgtcgtactcggagacaggaccgccgaacgagctgtcgtcgtcgtcgtcgtcgtcgaccagctcctcaaacggtcggcctgtctcgccaccggtcgtcgccacaccagctcgtcgtccggcccgtcctcgtgccctctcggtatcgtcgctcggctcgcctggtccagttgtcgcctcacccacgagctcggtcagctcggacggctcgctgctcgtcgttcggcccgccgctgctcgtcgtcgtgcctcggtcggcggtgctcgacctgtcgtcccctcggcctcacacaccccgacgacgagctggtgtggcgacgaccggtggcgagacaggccgaccgtttgaggagctggtcgacgacgacgacgacgacgacaagagggagacccgacgtcgagccggctgcgagaccgtaggcgcgcgacgaggaggttcttttagggttagggtgtaacgggcatgcaatgacaaaggcgggtctatggacgggaggcgaggagtttgagagttagacgaggggaggagacggaagcagaggaagggagcgcaacttagcggcctggacgttcaaaagcgaggcagcgctggcggcagcaaccgaagcctgcgactggacggcctggatgttcaggagcgacgcggccgaggcagcagcaaccgaggcgaccgactgggcagcctgaaggttcaggagcgaggcagccgaggcagaggcgatggcggcgaccgactgggcggcaaccgaagcctgcgaggcgagtccctgaaccgagaggaccgaggcgagcgaagcctgggcaaccgaagcctgcgactgaagttgcgctcccttcctctgcttccgtctcctcccctcgtctaactctcaaactcctcgcctcccgtccatagacccgcctttgtcattgcatgcccgttacaccctaaccctaaaagaaccctaaaagaacctccaaagtcgaggcccagctgccggccctctcgcggctttccgacctgcccggccaagaggctctcctcgtcttgcgtcactgcttggcgagcaacctccgtcatctgcagcgctcccttcggacggccttctaagttgcgctcccttcctctgcttccgtctcctcccctcgtctaactctcaaactcctcgcctcccgtccatagacccgcctttgtcattgcatgcccgttacaccctaaaagaaccgccaacggcctcgaggtcctcgggacttgcatcggccctcctgacgttcgcgctgccttcctcgaccggcgcatcgccgaccagctgccggccatcgaccggctcgccgacctgccgcctcaggaggccctcttactctcgactttgccaacgccttcaactcgctcgaccgtcggtcgctcgccaaggccctgtcgcagcatgctccggccctctaccgcgctggtcgctgggcgtacgacacgccgacgccgctgttcgtctccgacgccgacggctcggtcaccgcgctcgagtccagccagggcgtccgtcaaggcgaccctcttggcccgcttctgttctcgctcggcatccgcaacaccgtcgaggcccttcaggccgacctcggcgactcgccgcttgaggtgctcgagcaggttgacgtacgggttgctgcagagggggcaagcaaccggtgccatggcggtgggtgcgagccgagctacagtgggagccactggtgaccgagccacaacgccgatagggtttagggtgtaacgggcatgcaatgacaaaggcgggtctatggacgggaggcgaggagtttgagagttagacgaggggaggagacggaagcagaggaagggagcgcaacttagaaggcgaaaaagcggagccagcagacgcaggcgtcttgtcggaggacgagatgcgcgaggaggaggaggagccggtgccagcggccacaccctccatcccgtcagcagtccgtcggcctatgccggcaccggcactgacggaagtgttgaacgacacggccttacaggggacaaggcagtcgggtgaacgcttaagatacatgaggacttgcgccttgaaaattgctatgagggaggaagccgtaagggcaagagagtgatgttacggagggtgtgctcaaaggctggatcctgcaggtcgagcgccagagcggtcacagggtcgtcacaatccgcagcgacaacggcggcgagtacctatcgaccgagtttgttagctggcttcgctcgctgggaatttgtcagcagacaacgattgccgacacgccgcagcagaacggcaaggcggagcgcgcgaaccggacgatcgaggaaaagatcacggccctcctgctcgagtcgggcctgcctggggcgtactgggctgagcggcgtctcgtgacacttgcgcaggttgagcgcaagcccgcacgcgggacgttcgtcgaagaaggcggcaaccgagtccagggcgccgggctcctccgacaggatgtacacgtcgtcgaggtaggccagcaaggcgtggcccgggccgaggtgccgttcgagagcggcgagggtgttgcgcgcgccgatcgaaaagagcagagggccgagagggtcgccttggcggacgccttcgctcgaggtaaggacgaccggcggtgccttggccatctcggtggccggcatcaagacacaccaaggcaagtcaaaatgcgctggctggtctcgggctcgggcttctagctcccagcccttgtcgccccctgttgcctcctcaggtcggcgtcgcgcgagcctgtcttcggacgggtcatcgatcgacgtccttcctgtccgtcgcccagggcatgccctccgtcgtcgagccttgtcagtcagctcggttgggtcctcttcggtgattgacatgggcggtgccttggccatctcggtggccggcatcaagacacaccaaggcaagtcaaaatgcgctggctggtctcgggctcgggcttctagctcccagcccttgtcgccccctgttgcctcctcaggtcgccgtcgcgcgagcctgtcttcggacgggtcatcgatcgacgtccttcctgttcgtcgcccagggcatgccctccgtcgtcgagccttgtcagtcagctcggttgggtcctcttcggtgattgacatggggtacggggccggcaagtcaaagtcaatggcacgctcgatggcccgggtgatgggctcagtaccgccggggctgccgacgccgaactgccaagggaggagctgtgagggcgccgagaagtgccggacaagcgacttggagacaagccggtagaggagctcgccgacggcgataggccggatgccgccgtccgacttgagcagaggcgtaagccgggacgtgcagaggagctgctgtccgggtgccgtgccttgtggcggtgccttggccatctcggtggccggcatcaagacacaccaaggcaagtcaaaatgcgctggctggtctcgggctcgggcttctagctcccagcccttgtcgccccctgttgcctcgtcaggtcggcgtcgcgcgagcctgtcttcggacgggtcatcgatcgacgtccttcctgttcgtcgcccagggcatgccctccgtcgtcgagccttgtcagtcagctcggttgggtcctcttcggtgattgacatggcagagggggcaagcgaccggtgccatggcggtgggtgcgagccgagctacagtgggagccactggtgaccgagccacaacgccgatggcaacggggggtggggtcgggtcgggtcgggttgcctggtctttttagggttagggtgtaacgggcatgcaatgacaaaggcgggtctatggacgggaggcgaggagtttgagagttagacgaggggaggagacggaagcagaggaagggagcgcaacttagaaggcgcgcgctccgccttgccgttctgctgcggcgtatcggcaatcgttgtctgctgacggattcccagcgagcgaagccagctaacaaactcggtcgataggtactcgccgccgttgtcgctgcggattgttacgaccctgtgaccgctctggcgctcgacctgcaggatccagcctttgagcacaccggctgcgtcgcttttggccctgatcgaccaagcccagtggtagtccgtgtactcgtcaatgacggtgagcaccctacaccaggcaacccgacccgacccgaccccaccccccgttgccatcggcgttgtggctcggtcaccagtggctcccactgtagctcggctcgcacccaccgccatggcaccggttgcttgccccctctgcagcaacccgtacgtcaacctgctcgagcacctcaagcggcagcaccccggtcgtcggctcagccgctcgcagctcctcgtgaccggcctcttcgggtgcgtctgcggtgctctcgccatcaagcccgggacgaacggctcgagcttgaccgtcgtgccggcgatcgacttgaggtgcttggcaaggagagctttgacctgctcgtgccgagcgatgcgccagagcgggcgagcgccgcagacctcgtcatggccgaggtcattgggctgggcgcagagggcacaggcgtcgtccttgccggggcagagcgtccggacgtgtaggccggcggcgacctcggacgccgagagacggagagcagggccaaaggggatcacggttggttcctcgatgtaggccttagcgagcgagccagcaacgagggcgaatggcttggaccacgcgagagggagcggcttgtggacggtccggcaggctgccagggtggcgaaccggtcgacgaggggtacagcaggctcgacctgaggggtgtgcgaggtcgaggggacgacaggtcgagcaccgccgaccgaggcacgatgacgagcagcggcgggccgaacgacgagcagcgagccgtccgagctgaccgccgtgctcgcttcttcgccttctaggcgaaatcccttagccacttgaactccttctcgccttcaatgtaacaccgtctatagcgcctctgaccttctgctcccatcgcatgccccgttaaaccctaagctgcctgcccgcctcggaggcatgggcctactgtcgcacgccgagtgctcgccgcacgcccgggccgccatggccgagtctgccgacctgctcgtcgacgctgccctctccccggccgacgaccccgcacatgaagcagcagccgcgacaaaaggcttagcccaagagggtggcagcggtttgtacacggtagcgcaactggccagcgaagcgaagcgttcgatcagaccctctggtgcgggggacggcgatcgttcagggtcggccgcccgcgactgggaagaggccgcctctgctctcctcccgttgttggagcccgaggttgagggcccgcccgccgacgtgcccgtttgtcccatcgttgttggtcctggagggcagggtctgggtcaccaggccccggggtgggctgcccggtttgcactgccgccgaagggtacctgagcagcgtctcgtaagcgtgggccagaaccagactatggttccggccaatcgtttacaacgcctcatgggaaccttggtacagtgcacgctgggcggtccaccctgtgggtctgggtcaccaggccccggggtgggctgcccggtttgcactgccgccgaagggtacctgagcagcgtctcgtaagcgtggttttcgccttctaagttgcgctcccttcctctgcttccgtctcctcccctcgtctaactctcaaactcctcgcctcccgtccatagacccgcctttgtcattgcatgcccgttacaccctaaccctggccctctgctcttttcgatcggcgcgcgcaacaccctcgccgctctcgaacggcacctcggcccgggccacgccttgctcgcctacctcgacgacgtgtacatcctgtcggaggagcccggcgcgcctggacgcgcgtccgcgggccaattcgagtccttcattcgttcatgcgcatccgatacgtctagcagacgaacagtgcgcggcagtctagtttgtgatgcgcgacgaagacgagggttgtacttgctttgcgatagacacgtcattttcaaaccaaaatctcaacgcgccctgttagctcaatcggtagagcgtcagactcttaacacagtctgttcaaagcagcggggtttcatctgaaggctgggggttcggttcagcgagtctatgagtcacgacttcaagggtatataggtccggaactggcgcttctgtcagaagcgtcattgtggtcttttggcccagtggtatcgtgttggttgccgggcacggttctaacagcaaggaggactgggtctgccgcctacacaagggcctctacggcttgaagcaggcggccaggcagtggtacctgaagctgcacgaggcactcacctcgattggcttcgagcggtcgacggtggatcactaggtagtagctcacccccactgtagtcggccctgcctcctgtctcgtcctacaggtgggatccatgagtcgttcacggagtagtcctgagactgagtcggccctgcctcctgtctcgtcctacagcccagcggccacccgggcgccacgccctggagtccgccggactctttcctcctctctcttttcgctccctcctcttagctagacgaccgctcgctccccctcctaaacctcagtcgttcacggagttttttcgccttctaagttgcgctcccttcctctgcttccgtctcctcccctcgtctaactctcaaactcctcgcctcccgtccatagacccgcctttgtcattgcatgcccgttacaccctaaaaggtagctcggctcgcacccaccgccatggcaccggttgcttgccccctctgcagcaacccgtacgtcaacctgctcgagcacctcaagcggcagcaccccggtcgtcggctcagccgctcgcagctccaggtaaagcgtgttacgttcgatgaagcgtaaccctaacttccggcgccgccgcgcgggcgggcgctgcagcgcgccggcgctggcgaccctcccgcaaaactaccacgacgctcttccttcaacagttcaagcctgacacggcccctggcgtttccggttggacggccccgctcctcggccacgctctgggcaacgccgacgtctcggccttcgtcctgctcctcacacggcaggtcgcccagggcatcgcttcggtcgagagcacgtagatgtcgtcgaggtaggcgagaacggcgtgcgagtcgccgaggtcggcctgaagggcctcgacggtgttgcggatgccgagcgagaacagaagcgggccgagagggtcgctagggtgtaacgggcatgcaatgacaaaggcgggtctatggacgggaggcgaggagtttgagagttagacgaggggaggagacggaagcagaggaagggagcgcaacttagaaggcgaaaaagcgaccgacgtcgagccggctgcgagaccgtaggcgcgcgacgaggagcgacggccgaggatgcgagccgagacgaggcggctggggcggaaaacgacgtcggaggggtggattgccgacaagcccagccttagggtgtaacgggcatgcaatgacaaaggcgggtctatggacgggaggcgaggagtttgagagttagacgaggggaggagacggaagcagaggaagggagcgcaacttagaaggcgaaaaagcgaggacgacgagctggtgtggcgacgaccggtggcgagacaggccgaccgtttgaggagctggtcgacgacgacgacgacgacgacaagagggaggcccgacgtcgagccggctgcgagaccgtaggcggggttagggtgtaacgggcatgcaatgacaaaggcgggtctatggacgggaggcgaggagtttgagagttagacgaggggaggagacggaagcagaggaagggagcgcaacttagaaggcgaaaaagacgtcgcccgcctgacgggcaacctctacggcctgaagcaggcaggacgcacctggtggtcggcaatggacaagactctgcaggggttcgggttcaagcggtcagccttcgaccactcactctacctgttgaaggaagagcgtcgtggtagttttgcgggagggtcgccagcgccagcgcgctgcagcgcccgcccgcgcggcggcgccggaagttagggttacgcttcatcgaacgtaacacgctttaccggcgttgcccagagcgtggccgaggagcgaggccgtccaaccggaaacgccaggggccgtgtcaggcttgaacgagtcgaagcactgcctgatgaggtcgagcgacggcaaagaagacggagccgcgggttagggtgtaacgggcatgcaatgacaaaggcgggtctatggacgggaggcgaggagtttgagagttagacgaggggaggagacggaagcagaggaagggagcgcaacttagaaggcgaaaaagtaaagcgtgttacgttcgatgaagcgtaaccctaacttccggcgccgccgcgcgggcgggcgctgcagcgcgccggcgctggcgaccctcccgcaaaactaccacgacgctcttccttcaacaggcagtacctcgctttcttgccaccgacccctctctgaccgccatccgtcgctccggccgcaagacccagtccccagctcggttccgtgatcagtatcaggtcaacgtcctccctcatcagcctccgccgttcccgacgtcaacgacggtcgtcagcaggcccctcgagctggtccacacggacctacaaggcccgatgcctgacacctcgctcggcggcgcccggtacatgctcaccgtcattgacgagtacagggttagggtgtaacgggcatgcaatgacaaaggcgggtctatggacgggaggcgaggagtttgagagttagacgaggggaggagacggaagcagaggaagggagcgcaacttagaaggcgaaagtaaagcgtgttacgttcgatgaagcgtaaccctaacttccggcgccgccgcgcgggcgggcgctgcagcgcgccggcgctggcgaccctcccgcaaaactaccacgacgctcttccttcaacaggccttcgccctcacactcggcggccagactgaccggcccgcgctcgagctcttcaccgactcggaccacgccggtgacaaggacagccgcaagtcagtcacaggcgtcctcgtctttgccttcggcataggcgggcctccaccccctgtggtggggctaaatcccccccgtcggcgcagccgacaacatggggttccctagcccggctagataggcgggcctccaccccctgtggtggggctaaatcccccccccgtcggcgcagccgacaacatggggttccctagcccggctagataggcgggcctccaccccctgtggtggggctaaatcccccccgtcggcgcagccgacaacatggggttccctagcccggcacgataccgagagggcacgaggacgggccggacgacgagctggtgtggcgacgaccggtggcgagacaggccgaccgtttgaggagctggtcgacgacgacgacgacgacgacaagagggaggcccgggttagggttagggtgtaacgggcatgcaatgacaaaggcgggtctatggacgggaggcgaggagtttgagagttagacgaggggaggagacggaagcagaggaagggagcgcaacttagaaggcaccgccgaccgaggcacgacgacgagcagcggcgggccgaacgacgagcagcgagccgtccgagctgaccgagctcgtgggtgaggcgacaaatggaccgggcggttcttttagggtgtaacgggctagggttagggtgtaacgggcatgcaatgacaaaggcgggtctatggacgggaggcgaggagtttgagagttagacgaggggaggagacggaagcagaggaagggagcgcaacttagaaggcgagccttctaagttgcgctcccttcctctgcttccgtctcctcccctcgtctaactctcaaactcctcgcctcccgtccatagacccgcctttgtcattgcatgcccgttacaccctaaccctaacccgttacaccctaacccccctaaccctaaaagggctcggtcaccagtggctcccactgtagctcggctcgcacccaccgccatggcaccggttgcttgccccctctgcagcaacccgtacgtcaacggcgttgtaaacgattggccggaaccatagtctggttctggcccacgcttacgagacgctgctcaggtacccttcggcggcagtgcaaaccgggcagcccaccccggggcctggtgacccaagcccacagggtggaccgcccagcgtgcactgtaccaaggttcccatgaggcgttgtaaacgattggccggaaccatagtctggttctggcccacgcttacgagacgctgctcaggtacccttcggcgggggcacatgaagcagcagccgcgacaaaaggcttagcccaagagggtggcagcggtttgtagacggtagcgcaactggccagcgaagcgaaccgttcgatcagaccctctggtgcgggggacggcgaggttcttttagggtgtaacgggcatgcaatgacaaaggcgggtctatggacgggaggcgaggagtttgagagttagacgaggggaggagacggaagcagaggaagggagcgcaacttagaaggcactatgaggtggcgctgcccagcacagtcccagctggtgcaacagcgagacttcctggtggggtcgacaagtgcgccggcggaagggcgtcgtccgcagcggccgacagcgccgtcggtgcagcggccgacagcgccgtcggtgcagcgaagaccagccgctgattggtgatccagacggtgccggtggacctggtggaccactgccagtggcaaccgacaggccagcgagcggcgagtcagggagaccgaggtaagcgacgactcctggcatttggcgacgttgagcgacaggccggcgtcgttgccgtcgaggaaggcaatgaccgactcgagcgctccggcctcggtcgaggttcttttagggttagggttcttttagggttagggtgtaacgggcatgcaatgacaaaggcgggtctatggacgggaggcgaggagtttgagagttagacgaggggaggagacggaagcagaggaagggagcgcaacttcttctaagttgcgctcccttcctctgcttccgtctcctcccctcgtctaactctcaaactcctcgcctcccgtccatagacccgcctttgtcattgcatgcccgttacaccctaaaagaacctcgcctcccgtccatagacccgcctttgtcattgcatgcccgttacaccctaaccctaaaagagtggctcccactgtagctcggctcgcacccaccgccatggcaccggttgcttgccccctctgtctcggccttcgttctgctcctcacacggcaggtcgcccagggcatcgctcctggccagcagctcctttgcgcgtcgaggctcacgccgctcctcaaggccgacggcggcatccggccgatcgcggtcggcgagctcctgtaccggctggttaccaaggccctcgttcgtcactactcggctccgtcccagttgctgcccttccagttcggcgtcggctccagcggcggtacagagcccatcacgcgccgcgttccggggccggccccggacgaggggcatgaaaaagggagccctccggcgattgagggaccggagccctccggcgcttgagggcccacccggtgccgtcttctatgcaggcacccgtgcccttgtactaatggatagggatggggcacgggtgcctgcatagaagacggcaccgggtgggccctcaagcgccggagggctccggtccctcaatcgccggagggctccctttttcatgcccgtacgacggcatgagggcgcgccagtggtcgaagagggggacagaggcgggggagagggtgccggcggtagagagaacgagagggaagaaaggggtggcggtgcgaccgaggtacttggaccgcttctcgttctcgaccagggtgagggggacgagaaggctggaggtggcgagggcagcggcagggagggaggcgtcgagcgagggcagggaggaggtggcagaggcagaggcagcagcagagagggcgagatgggctttgccggcggcaggcgagacggacgtcgcgagctccagcgccggagctaggcctaccttgggcagcgcgaggaagtcgaacagccgagcctcggttggttcctttttttagggtgtaacgggcatgcaatgacaaaggcgggtctatggacgggaggcgaggagtttgagagttagacgaggggaggagacggaagcagaggaagggagcgcaacttagaaggcgaaaaagccctgcaagcattggcggagcagtaagagggcctcctgaggcggcaggtcggcgagccggtcgatggccggcagctggtcggcgatgcgccggtcgaggttcttttagggttagggttaggttagggttagggtgtaacgggcatgcaatgacaaaggcgggtctatggacgggaggcgaggagtttgagagttagacgaggggaggagacggaagcagaggaagggagcgcaacttagaaggcgaggcgagatgggctttgccggcggcaggcgagacggacgtcgcgagctccagcgccggagctaggcctaccttgggcagcgcgaggaagtcgaacagccgagcctcggttggttcctttttttagggttagggtgtaacgggcatgcaatgacaaaggcgggtctatggacgggaggcgaggagtttgagagttagacgaggggaggagacggaagcagaggaagggagcgcaacttagaaggcgacaaaggattctaggtggccctccaccaagccgaagagcaaacctttgttaaggaactcggctaactctatccgtacgctcgtctagaaggataggctgccccaccaccccggtgaatggggcagcctatccttctagacgagcgtacggatagagttagccgagttccttaacaaaggtttgctcttcggcttggtggagggccacctagaatcctttgttggatcggtacgataacatcccacctgcaagcattggcggagcagtaagagggcctcctgaggcggcaggtcggcgagccggtcgatggccggcagctggtcggcgatgcgccggtcgaggttcttttagggttagggttaggttagggtgtaacgggcatgcaatgacaaaggcgggtctatggacgggaggcgaggagtttgagagttagacgaggggaggagacggaagcagaggaagggagcgcaacttagaaggcgaaaaaggaggaaggcagcgcgaacgtcaggagggccgatacaagtcccgaggacctcgaggccgttggcggcaaccgaggtaagcgacgactcctggcatttggcgacgttgagcgacaggccgggttagggtgtaacgggcatgcaatgacaaaggcgggtctatggacgggaggcgaggagtttgagagttagacgaggggaggagacggaagcagaggaagggagcgcaacttagaaggcgaaaaatttttcgccttctaagttgcgctcccttcctctgcttccgtctcctcccctcgtctaactctcaaactcctcgcctcccgtccatagacccgcctttgtcattgcatgcccgttacaccctaaaagagtggctcccactgtagctcggctcgcacccaccgccatggcaccggttgcttgccccctctgcagcaacccgtacgtcaacctgctcgagcacctcaagcggcagcaccccggtcggaggaaggcagcgcgaacgtcaggagggccgatacaagtcccgaggacctcgaggccgttggcggcaaccgaggtaagcgacgactcctggcatttggcgacgttgagcgacaggccgggttagggttagggtgtaacgggcatgcaatgacaaaggcgggtctatggacgggaggcgaggagtttgagagttagacgaggggaggagacggaagcagaggaagggagcgcaacttagaaggccgctcgcctgctcgccgaggactcgtccgtcgccgacctcacgccggccaccattgccgctcttgcctccaagcaccccgtcggtccggtctcgcccttcggccctcggtcaggcgcggctccgtcttctttgccgtcgctcgacctcatcaggcagtgcttcgactcgttcaagcctgacacggcccctggcgtttccggttggacggcctcgctcctcggccacgctctgggcaacgcccgctcgagcagcgcgttgtcgagcgtgagccagggtgagtcaaggtcgtccgttcgaagcgagcgctgaaggtgccggaggttggcctgcaagcattggcggagcagtaagagagcctcctgaggcggcaggtcggcgagccggtcgatggccggcagctggtcggcgatgcgccggtcgaggaaggcagctcgaacgtcaggagggccgatgcaagtcccgaggacctcgaggccgttggtttcgccttctaagttgcgctcccttcctctgcttccgtctcctcccctcgtctaactctcaaactcctcgcctcccgtccatagacccgcctttgtcattgcatgcccgttacaccctaaaagggctcggtcaccagtggctcccactgtagctcggctcgcacccaccgccatggcaccggttgcttgccccctctgcagcaacccgtacgtcaacctgctcgagcacctcaagcggcaaggcgctcggcaacgacctgacgttccacgtcttcgaccacaagactgcctccgccgcatggacgtctctcctggacgtgtacgagcccaagtcgagcagcaacctgcactcgctccttcggcagcttaccgccacgcgctgggaccaggtcaccccgatggagcagcacatcaatacgatccgcggacgcatcgccgaactcaaggcaatcggcgagaccatctcgcccaacctgcacgcgaggagctgcgagcggctgagccgacgaccggggtgctgccgcttgaggtgctcgagcaggttgacgtacgggttgctgcagagggggcaagcaaccggtgccatggcggtgggttcttttagggtgtaacgggcatgcaatgacaaaggcgggtctatggacgggaggcgaggagtttgagagttagacgaggggaggagacggaagcagaggaagggagcgcaacttagaaggcgaagtcacgaggagctgcgagcggctgagccgacgaccggggtgctgccgcttgaggtgctcgagcaggttgacgtacgggttgctgcagagggggcaagcaaccggtgccatggcggttcttttagggttagggtgtaacgggcatgcaatgacaaaggcgggtctatggacgggaggcgaggagtttgagagttagacgaggggaggagacggaagcagaggaagggagcgcaacttagaaagccgttcacccacgtcacctcactcgactttgccaacgccttcaactcgctcgaccgtcggtcgctcgccaaggccctgtcgcagcatgctccggccctctaccgcgctggtcgctgggcgtacgatacgccgacgccgctgttcgtctctggcgccgacggctcggtcaccgcgctcgagtctagccagggcgtccgtcaaggcgaccctctcggcccgcttctgttctcgctcggcaaccagggtgagggggacgagaaggctggaggtggcgagggcagcggcagggagggaggcgtcgagcgagggcagggaggaggtggcagaggcagaggcagcagcagagagaaaaagagaagcgggagacggccgacgaccgcccaaggtcgccgccgccacgaccgagacgtcaaactcggacagcgggccgttgtacgaggccgtgccggcgatgcgcaagtcggtccggaggtgcgaaccagggtgagggggacgagaaggctggaggtggcgagggcagcggcagggagggaggcgtcgagcgagggcagggaggaggtggcagaggcagaggcagcagcagagagaaaaagagaagcgggagggggccgacgaccgcccaaggttgccgccgccacgaccgagacgtcgaactcggacagcgggccgttgtacgaggccgtgccggcaatgcgcaagtcggtccggaggtgcgatcgccttctaagttgcgctcccttcctctgcttccgtctcctcccctcgtctaactctcaaactcctcgcctcccgtccatagacccgcctttgtcattgcatgcccgttacaccctaaaagaacctgaccgccatggcaccggttgcttgccccctctgcagcaacccgtacgtcaacctgctcgagcacctcaagcggcagcaccccggtcgtcggctcagccgctcgcagctcctcgcgatcggccggatgccgccgtcggccttgaggagcggcgtgagcctcgacgcgcaaaggagctgctggccaggagcgatgccctgggcgacctgccgtgtgaggagcaggacgaaggccgagacgtcggcgttgcccagagcgtggccgaggagcgaggccgtccaaccggaaacgccaggggccgtgtcaggcttgaacgagtcgaagcactgcctgatgaggtcgagcgacggcattgccgacacgccgcagcagaacggcaaggcggagcgcgcgaaccggacgatcgaggaaaagatcacggccctcctgctcgagtcgggcctgcccggggcgtactgggccgaggccatgacctacgccctctacgttttggcccggaccgtccgaaagtcgaccggccagacgcggcatgacgactggttcggctcacccccgtcatttgaccggctgcgcgtctttggctgcacgggggtgctgccgcttgaggtgctcgagcaggttgacgtacgggttgctgcagagggggcaagcaaccggtgccatggcggtgggtgcgagccgagctacagtgggagccactcttttagggttagggttagggtgtaacgggcatgcaatgacaaaggcgggtctatggacgggaggcgaggagtttgagagttagacgaggggaggagacggaagcagaggaagggagcgcaacttatcgtaagcgtgggccagaaccagactatggttccggccaatcgtttacaacgcctcatgggaaccttggtacagtgcacgctgggcggtccaccctgtgggtctgggtcaccaggccccggggtgggctgcccggtttgcactgccgccgaagggtacctgagcagcgtctcgtaagcgtgggccagaaccagactatggttccggccaatcgtttacaacgcctcatgggaaccttaaggtgccggaggttggcctgcaagcattggcggagcagtaagagggcctcctgaggcggcaggtcggcgagccggtcgatggccggcagctggtcggcgatgcgccggtcgaggttcttttagggtgtaacgggcatgcaatgacaaaggcgggtctatggacgggaggcgaggagtttgagagttagacgaggggaggagacggaagcagaggaagggagcgcaacttagaaggcgtcacgaggagctgcgagcggctgagccgacgaccggggtgctgccgcttgaggtgctcgagcaggttgacgtacgggttgctgcagagggggcaagcaaccggtgccatggcggttcttttagggtgtaacgggcatgcaatgacaaaggcgggtctatggacgggaggcgaggagtttgagagttagacgaggggaggagacggaagcagaggaagggagcgcaacttagaaggaacgacgtcggaggggtggattgccgacaagcccagcctgagcacttggtcttgccttggtgcgtcttgatgccggcggtactgatggcgagagcaccgcagacgcacccgaagaggccggtcacgaggagctgcgagcggctgagccgacgaccggggtgctgccgcttgaggtgctcgagcaggttgacgtacgggttgctgcagagggggcaagcaaccggtgccatggcggttcgagcttctggtaaagctgcgtcgaggacggaggggcgtccgggacgaggttgagcagggcgtcggccatcgtgaggaaggggggtgaagggatcagactcttaatctgttgaacgacacggccttacaggggacaaggcagtcgggtgaacgcttaagatacatgaggacttgcgccttgaaaattgctatgagggaggaagccgtaagggcaagagagtgatgttacggaggagtaagagggcctcctgaggcggcaggtcggcgagccggtcgatggccggcagctggtcggcgatgcgccggtcgaggaaggcagcgcgaacgtcaggagggccgatacaagtcccgaggacctcgacgccgttggcggcaaccgaggcaagcgacgactcctggcatttggcgacgttgagcgacaggccggcgtcgttgccgtcgaggaaggcaatgaccgactcgagcgctcgttgacgtacgggttgctgcagagggggcaagcaaccggtgccatggcggtgggtgcgagccgagctacagtgggagccactggtgaccgagcccttttagggttaggggggttagggtgtaacgggcatgcaatgacaaaggcgggtctatggacgggaggcgaggagtttgagagttagacgaggggaggagacggaagcagaggaagggagcgcaacttagaaggcgaaaaatcgactcgttcaagcctgacacggcccctggcgtttccggttggacggcctcgctcctcggccacgctctgggcaacgccgacgtctcggccttcgtcctgctcctcacacggcaggtcgcccagggcatcgctcctggccagcagctcctttgcgcgtcgaggctcacgccgctcctcaaggccgacggcggcatccggccgatcgcggttggcgagctcctgtaccggctggtctggacggcgcaaggctgtacgtcccctgccctcgctcttgctcctggcccacagtcgtctgccgggcgctctcggtcgcgaggctgactgttacctctgtccgcctcaggcttcgtcgacggcccttctcgcctgctgagcgggctgaagcctgacctcggagcgagcctcacgccggcgagctgcgtcgccgcgtgcgtcgccaagggctttgcgtacgccggcgtccagaagttgcgctcccttcctctgcttccgtctcctcccctcgtctaactctcaaactcctcgcctcccgtccatagacccgcctttgtcattgcatgcccgttacaccctaaccctaaccctaaaagaacccaccgccatggcaccggttgcttgccccctctgcagcaacccgtacgtcaacctgctcgagcacctcaagcggcagcaccccggtcgtcggctcagccgctcgcagcgcaacttctctgcacgtctcggctcacgcctctgctcaagtcggacggcggcatccggcctatcgccgtcggcgagctcctctaccggcttgtctccaagtcgctcgtccggcacttctcggcgccctcacagctcctcccttggcagttcggcgtcggcagccccggcggtactgagcccatcacccgggccatcgagcgtgccattgactttgacttgccggccccgtaccctgcgagcggctgagccgacgaccggggtgctgccgcttgaggtgctcgagcaggttgacgtacgggttgctgcagagggggcaagcaaccggtgccatggcggtcaggttcttttagggttagggtgtaacgggcatgcaatgacaaaggcgggtctatggacgggaggcgaggagtttgagagttagacgaggggaggagacggaagcagaggaagggagcgcaacttagagctgcgagcggctgagccgacgaccggggtgctgccgcttgaggtgctcgagcaggttgacgtacgggttgctgcagagggggcaagcaaccggtgccatggcggtgggttcttttagggttagggtgtaacgggcatgcaatgacaaaggcgggtctatggacgggaggcgaggagtttgagagttagacgaggggaggagacggaagcagaggaagggagcgcaacttagaaccagccggtacaggagctcgccaaccgcgatcggccggatgccgccgtcggccttgaggagcggcgtgagcctcgacgcgcaaaggagctgctggccaggagcgatgccctgggcgacctgccgtgtgaggagcagaacgaaggccgagacgttggcgttgcccagagcgtggccgaggagcggggccgtccaaccggaaacgccaggggccgtgtcaggcttgaacgagtctggccgaggtcattgggctgggcgcagagggcacaggcgtcgtccttgccggggcagagcgtccggacgtgtaggccggcggcgacctcggacgccgagagacggagagcagggccaaaggggatcacagcaagccagcgtcttgccaccggggaggagttgtcaaggatggtggtggcagaggacgcaggcaacgcacagagtagagcctcgcgacgggtggcgaaggcggcgactcgttcaagcctgacacggcccctggcgtttccggttggacggcctcgctcctcggccacgctctgggcaacgccgacgtctcggccttcgtcctgctcctcacacggcaggtcgcccagggaatcgctcctggccagcagctcctttgcgcgtcgaggctcacgccgctcctcaaggccgacggcggcatccggccgatcgcggttggcgagctcctgtaccggctggtggcggaacagagaggagccaatgaggagaagggaaaacgaaacagacgaaggcgggcggcgccgcggagcggaagccagagaggcgcactagagccgagccagtcgcgaccgagccttgatgaggatgagcgagagcacccggacaaagtgcgagtaggtcgaaggagcgagggactcgcgccagccatcaagtagcttcaggccgccggactcgaccgcaccgccagagctccgaggtcgccgccggcctacacgtccggacgctctgccccggcaaggacgacgcctgtgccctctgcgcccagcccaatgaccttggccacgacgaggtctgcagcgctcgcccgctctggcgcattgctcggcacgagcaggtcaaagctctccttgccaagcacctcaagtcgatcgccggcacgacggtcaagctcgagccgttcgtcccgggctcgcacctccggaccgccgaccgaggcacgacgacgagcagcggcgggccgaacgacgagcagcgagccgtccgagctgaccgagctcgtgggtgaggcgacaaatggaccgggcggttcttttagggttagggttagggttagggtgtaacgggcatgcaatgacaaaggcgggtctatggacgggaggcgaggagtttgagagttagacgaggggaggagacggaagcagaggaagggagaaagagaagcgggagacggccgacgaccgcccaaggtcgccgccgccacgaccgagacgtcaaactcggacagcgggccgttgtacgaggccgtgccggcgatgcgcaagtcggtccggaggtgcgagcccgggacgaacggctcgagcttgaccgtcgtgccggcgatcgacttgaggtgcttggcaaggagagctttgacctgctcgtgccgagcgatgcgccagacaccgccgaccgaggcacgacgacgagcagcggcgggccgaacgacgagcagcgagccgtccgagctgaccgagctcgtgggtgaggcgacaaatggaccgggcggttcttttagggtgtaacgggcatgcaatgacaaaggcgggtctatggacgggaggcgaggagtttgagagttagacgaggggaggagacggaagcagaggaagggagcgcaacttagaaggcgttgcgctcccttcctctgcttccgtctcctcccctcgtctaactctcaaactcctcgcctcccgtccatagacccgcctttgtcattgcatgcccgttacaccctaaccctaaccctaaaagaaccgcccggtccatttgtcgcctcacccacgagctcggtcagctcggacggctcgctgctcgtcgttcggcccgccgctgctcgtcgtcgtgcctcggtcggcggttgcgctcccttcctctgcttccgtctcctcccctcgtctaactctcaaactcctcgcctcccgtccatagacccgcctttgtcattgcatgcccgttacaccctaaccctaaccctaaaagaacctgaccgccatggcaccggttgcttgccccctctgcagcaacccgtacgtcaacctgctcgagcacctcaagcggcagcaccccggtcgtcggctcagccgcctcccttcctctgcttccgtctcctcccctcgtctaactctcaaactcctcgcctcccgtccatagacccgcctttgtcattgcatgcccgttacaccctaaccctaaccctaaccctaaaagaacctgaccgccatggcaccggttgcttgccccctctgcagcaacccgtacgtcaacctgctcgagcacctcaagcggcagcaccccggtcgtcggctcagccgcgacacgtactcacccgtcgctgatggtacgtcccgccggacttttctttcaatcgtcgccaacgagggcctcacgatccgccaaggcgacgtcaagacagccttcctctacgccaagctcgacgagccgatctggatgaccccaccgcccggctacgccgactcgcccgatcagctgtgctacgtcagctcggccgtctacggcctgcgccagtcgccgaaggcttggaggagacggaagcagaggaagggagcgcaacttagaaggcgaaaaagcgagcacgcgcccggagaagtgagagggagaggaggcgggagaagagaccgtacgacggcatgagggcgcgccagtggtcgaagagggggacagaggcgggggagagggtgccggcggtagagagaacgagagggaagaaaggggtggcggtgcgaccgaggtacttggaccgcttccaagacgagaagcgacggccgaggatgcgagccgagaagaggcggctggggcggaaaacgacgtcggcggggtggtttgccgacaagcccagccagcacacttggtcttgccttggtgcgtcttgatgccggcggtactgatggcgagagcaccgcagacgcacccgaagaggccggtcacgaggagctgcgagcggctgagccgacgaccggggtgctgccgctgagaagcgggagggggccgacgaccgcccaaggttgccgccgccacgaccgagacgtcgaactcggacagcgggccgttgtacgaggccgtgccggcaatgcgcaagtcggtccggaggtgcgagcccgggacgaacggctcgagcttgaccgtcgtgccggcgatcgacttgaggtgcttggcaaggagagctttgacctgctcgtgccgagcgatgcgccagagcactatgaggtggcgctgcccagcacagtcccagctggtgcaacagcgagacttcctggtggggtcgacaagtgcgccggcggaagggcgtcgtccgcagcggccgacagcgccgtcggtgcagcgaagaccagccgctgattggtgatccagacggtgccggtggacctggtggaccactgccagtggcaaccgacaggccagcgagcggcgagtcagggagccccggggtgggctgcccgggttggctgcccggcttgcaatcgtttacaacgcctcatgggaaccttggtacagtgcacgctgggcggtccaccctgtgggcttgggtcaccaggccccggggtgggctgcccggtttgcactgccgccgaagggtacctgagcagcgtctcgtaagcgtgggccagaaccagactatggttccggccaatcgtttacaacgccacgaaggccgagacgttggcgttgcccagagcgtggccgaggagcggggccgtccaaccggaaacgccaggggccgtgtcaggcttgaacgggtcaaagcactgcctgatgaggtcgagcgacggcaaagaagacggagccgcgcctgaccgagggccgaagggcgagaccggaccgacggggtgcttggaggcaagagcggcaatggtggccggcgtgaggttgggcctactgtcgcacgccgagtgctcgccgcacgcccgggccgccatggccgagtctgccgaccttctcgtcgacgctgctctctccccggctgacgaccccggcccggacgcggcccccgtcatcgtctcccagcgcgctcgctgccaggccgccttcgccacccgtcgcgaggctctactctgtgcgttgcctgcgtcctctgccaccaccatccttggacgttggcttggtgtcgtccccttccggtcggtgctcgagctgtcggacgccgaggtcgcttctggtcttcacttccggacgctctgccccggctcgctcgacttctgcgccgactgtggcgacgctgctccgttcggtcacgacgaggcctgctcgggtcgtgctccggtcgctctcggtcgacacgagcaggtcaagcggctcatcaacaacacccaagcgacgactcctggcatttggcgacgttgagcgacaggccggcgtcgttgccgtcgaggaaggcaatgaccgactcgagcgctccggcctcggtcgagagcacgtagatgtcgtcgaggtaggcgagaacggcgtgcgagtcgccgaggtcggcctgaagggcctcgacggtgttgcggatgccgagcgagaacagaagcgggccgagagggtcgcgcgctcccttcctctgcttccgtctcctcccctcgtctaactctcaaactcctcgcctcccgtccatagacccgcctttgtcattgcatgcccgttacaccctacaccaggcaacccgacccgacccgaccccaccccccgttgccatcggcgttgtggctcggtcaccagtggctcccactgtagctcggctcgcacccaccgccatggcaccggtcgacgacaaagtcgtcaacgtacagcatgaggaggactttctggccgtgccgctggccgaggaagacacacttgtccgactcaatcgggacgaggccgatgctgaccaggaacgaagcgattcggtcatagaaagccttcggcgactggcgcaggccgtagacggccgagctgacgtagcacagctgatcgggcgagtcggcgtagccgggcggtgccgaggtcgccgccggcctacacgtccggacgctctgccccggcaaggacgacgcctgtgccctctgcgcccagcccaatgacctcggccacgacgaggtctgcggcgctcgcccgctctggcgcatcgctcggcacgagcaggtcaaagctctccttgccaagcacctcaagtcgatcgccggcacgacggtcaagctcgagccgttcgtccccagaggcagaggcagcagcagagagggaaagagaagcgggagggggccgacgaccgcccaaggttgccgccgccacgaccgagacgtcgaactcggacagcgggccgttgtacgaggccgtgccggcgatgcgcaagtcggtccggaggtgcgagcccgggacgaacggctcgagcttgaccgtcgtgccggcgatcgacttgaggtgcttggcagaggcagaggcagcagcagagagggaaagagaagcgggagggggccgacgaccgcccaaggttgccgccgccacgaccgagacgtcgaactcggacagcgggccgttgtacgaggccgtgccggcaatgcgcaagtcggtccggaggtgcgagcccgggacgaacggctcgagcttgaccgtcgtgccggcgatcgacttgaggtgcttggccatgtcaatcaccgaagaggacccaaccgagcggactgacaaggctcgacgacggagggcatgccctgggcgacggacaggaaggacgtcgatcgatgacccgtccgaagacaggctcgcgcgacggcgacctgacgaggcaacagggggcgacaagggctgggagctagaagcccgagcccgagaccagccagcgcattttgacttgcctaccagggtgagggggacgagaaggctggaggtggcgagggcagcggcagggagggaggcgtcgagcgagggcagggaggaggtggcagaggcagaggcagcagcagagagggaaagagaagcgggagggggccgacgaccgcccaaggttgccgccgccacgaccgagacgtcgaactcggacagcgggccgttgtacgaggccgtgccggcgcgaccgagccttgatgaggatgagcgagagcacccggacaaagtgcgagtaggtcgaaggagcgagggactcgcgccagccatcaagtagcttcaggccgccggactcgaccgcaccgccagagctaaggacaaaaggccggaagggagcagacacccggcgggcgtacttgagcggcttggcgtgagctgcggccgagagggcgtcctgcgaccgagccttgatgaggatgagcgagagcacccggacaaagtgcgagtaggtcgaaggagcgagggactcgcgccagccatcaagtagcttcaggccgccggactcgaccgcaccgccagagctgaggacaaaaggccggaagggagcagacacccggcgggcgtacttgagcgtcttggcgtgagctgcggccgagagggcgtcctggtggacaccgccccgcacgttgtcggctgcgccgacgggaggatttcgcccctccacagggggtgagagcccgcctatctagccgggctagggaaccccatgttgtcggctgcgccgacgggggggatttagccccaccacagggggtggaggcccgcctatctagccgggctagggaaccccatgttgtcggctgcgccgacgggggtggacaccgccccgcacgttgtcggctgcgccgacgggaggatttcgcccctccacagggggtgagagcccgcctatccagccgggctagggaaccccatgttgtcggctgcgccgacgggggggggatttagccccaccacagggggtggaggcccgcctatctagccgggctagggaaccccatgttgtcggctgcgccgacggggcatccggcctatcgccgtcggcgagctcctctaccggcttgtctccaagtcgctcgtccggcacttctcggcgccctcccagctcctcccttggcagttcggcgttggcagccccggcggtactgagcccatcacccgggccatcgagcgtgccatcgactttgacttgccggccccgtaccagcacgtcacctcgctcgacttccccgtcggcgcagccgacaacatggggttccctagcccggctagataggcgggcctccaccccctgtggtggggctaaatccccccccgtcggcgcagccgacaacatggggttccctagcccggctggataggcgggctctcaccccctgtggaggggcgaaatcctcccgtcggcgcagccgacaacgtgcggggcggtgtccacaagcgacgactcctggcatttggcgacgttgagcgacaggccggcgtcgttgccgtcgaggaaggcaatgaccgactcgagcgctccggcctcggtcgagagcacgtagatgtcgtcgaggtaggcgagaacggcatgtgagtcgccgaggtcggcctgaagggcctcgacggtgttgcggatgccgagcgagaacagaagcgggccaggccccggtacgtgcccggccggcgccagcacaggctccggtccctcttgcacaaccacaggagctgactcgtctcttcctggctcggcagctcgatacggggtgtcctggccgttctgctcgtcgaccccatctccttgtgcgcctacctttgggacgccgtcgtaatgcctgcacgggctctcgtcgtctcgtgcgtcgtcccggcatcggcaaaggcgaccttgagctgggcgtcggccgactcggccatggcagctcgagcgtggggtgagacctcggcgtgcgagaggaggcccatgccgccgagccgagcgggcagagacacaaggccggcgtccgatacgaggcggcgaggcgacgaccggaggatgtggaagcgctcgagcagggcctcgtcgagcgggtccctcgacctcgcacacccctcaggtcgagcctgctgtacctctcgtcgaccggttcgccaccctcgcagcctgccgcaccgtccacaagccgctccctctcgcgtggtccaagccattcgccctcgttgctggctcgctcgctaaggcctacatcgaggaaccaaccgaggctcggctgttcgacttcctcgcgctgcccaaggctggccagcagctcctttgcgcgtcgaggctcacgccgctcctcaaggccgacggcggcatccggccgatcgcggttggcgagctcctgtaccggctggtcaccaaggccctcgttcgtcactactcggctccgtcccagttgctgcccttccagttcggcgtcggctccagcggcggtacagagcccatcacgcgcgcgctcggcccggtgggcgccgtgcccttgtactaatggatagggatggggcacgggtgcctgcatagaagacggcaccgggtgggccctcaagcgccggagggctccggtccctcaatcgccggagggctccccaaacgcaccgcctacaccgcccccaagccgacaccacgaggttcccatagggcgttgtaaacgattggccggaacctgatggcgagagcaccgcagacgcacccgaagaggccggtcacgaggagctgcgagcggctgagccgacgaccggggtgctgccgcttgaggtgctcgagcaggttgacgtacgggttgctgcaaagggggcaagcgaccggtgccatggcggtgggtgcgagccgagctacagtgggagccactggtgaccgagccacaagcgtgatgggctctgtaccgccgctggagccgacgccgaactggaagggcagcaactgggacggagccgagtagtgacgaacgagggccttggtaaccagccggtacaggagctcgccaaccgcgatcggccggatgccgccgtcggccttgaggagcggcgtgagcctcgacgcgcaaaggagctgctggccaggagcgattagggtgtaacgggcatgcaatgacaaaggcgggtctatggacgggaggcgaggagtttgagagttagacgaggggaggagacggaagcagaggaagggagcgcaacttagaaggcgaaaaagcgagcacgcgcccggagaagtgagagggagaggaggcgggagaagagaccgtacgacggcatgagggcgcgccagtggttgctccggctctctaccgtgccggtcgctggatctacggctcgcccgctcagctcgcggtcaccggtgccggtggggcggtcgacgtgctcgagtcatcgcaaggggtccgacaaggcgacccgtttggtccgctcttcttctcggtcgccattcgccggacgctggacgacctcgttcgacacctcggcccggaccgggggggggatttagccccaccacagggggtggaggcccgcctatctagccgggctagggaaccccatgttgtcggctgcgccgacgggggggatttagccccaccacagggggtggaggcccgcctatctagccgggctagggaaccccatgttgtcggctgcgccgacgggggggggatttagccccaccacagggggtggcggcgtctcgtgacacttgcgcaggttgagcgcaagcccgcacgcgggacgttcgtcgaagaaggcggcaaccgagtccagggcgccgggctcctccgacaggatgtacacgtcgtcgaggtaggcgagcaaggcgtggcccgggccgaggtgccgttcgagagcggcgaggatgttgcgcgcgccgatcgaaaagaaacgggtcgccttgtcggaccccttgcgatgactcgagcacgtcgaccgccccaccggcaccggtgaccgcgagctgagcgggcgagccgtagatccagcgaccggcacggtagagagccggagcaaaatcgcgcagccctgcggcaaggtcgcgacggtcgacggtgttgaaggcgggttagggttactgcagcacgtcgcccagggcatgccctccgtcgtcgagccttgtcagtcagctcggttgggtcctcttcggtgattgacatgggtcaacccgatcgggctcagacggtggccgatgaccgtccctctcgagggagctaccacggtcctgtcgcagggcgccggtgccctccaggaccaacaacgatgggacaaacgggcacgtacgcttaagatacatgaggacttgcgccttgaaaattgctatgagggaggaagccgtaagggcaagagagtgatgttacggaaggaggtaaagcgtgttacgttcgatgaagcgtaaccctaacttccggcgccgccgcgcgggcggccgccgccgcgcgggcgggcgctgcagcgcgccggcgctggcgaccctcggcagcggcaaaggcgacctggagctgggcgtcggccgactcggccatggcagctcgagcgtggggtgagacctcggcgtgcgagaggaggcccatgccgccgagccgagcgggcagagacacaagaccggcgtccgatacgaggcggcgaggcgacgaccggaggatgtggaagcgctcgagcagggcctcgtaggaaccaaccgaggctcggctgttcgacttcctcgcgctgcccaaggtaggcctagctccggcgctggagctcgcgacgtccgtctcgcctgccgccggcaaagcccatctcgccgcgtttcctgccgtcgactggccgtccccttcggtcgctcggccgtcggagtcatcgctgcctcgtcggattgccatcgaccgccatggcaccggttgcttgccccctctgcagcaacccgtacgtcaacctgctcgagcacctcaagcggcagcaccccggtcgtcggctcagccgctcgcagctcctcgtgaccggcctcttcgggtgcgtctgcggtgctctcgccatcagtaccgccggcatcaagacgcaccaaggcaagaccaagtgctggacccacagccccggacctacaatgtcagcctctggattacgcacaccgccacccccaacctgccccaggccccggggtgggctgcccggtttgcactgccgccgaagggtacctgagcagcgtctcgtaagcgtgggccagaaccagactatggttccggccaatcgtttacaacgcctcatgggaaccttgaagaaagccagagaagaggataaagcagaatggaagaaagccagagaagaggataaagcagagtggaagaaagccagagaagaggataaagcagaatggaagaaagccagagaagaggataaagcagagtggaagaaagccagagaagaggataaagcagaatggaagaaagccagagaagaggataaagcaagcaaggcgtggcccgggccgaggtgccgttcgagagcggcgagggtgttgcgcgcgccgatcgaaaagagcagagggccgagagggtcgccttggcggacgccttcgctcgaggtaaggacgaccggagcgtcgccgccgatggtcgacacgacaagcggggtcgggacgtcgtacgcccagcgaccggcgcagctggagccggtacgagccgccacacatctgcgacttgtcgcccgtgcaggcgacctggcagcctgagtcggccgccttggtcccgatctcgccagagaggttgagcgacggcccgcagtagcactctgccagtcgccatcggccgtcgttcgagtagagtagagagagcgagaaggaagcaggaagggagggagcggcaccttgtttggcttggactctgacatgccccatcgttcgagcagctccttgaccttgtgctcctggccgacctcgatccgccgccgggcccggtctcgctcgaccttcaagccgatcatgtgcgtgagctcgccgaggtccgtcatcttgtagaccgccgagagctgggctttgaagcgccagagggggcaagcaaccggtgccatggcggtgggtgcgagccgagctacagtgggagccactcttttagggttagggtgtaacgggcatgcaatgacaaaggcgggtctatggacgggaggcgaggagtttgagagttagacgaggggaggagacggaagcagaggaagggagcgcaacttagaaggcagaccggaccgacggggtgcttggaggcaagagcggcaatggtggccggcgtgaggtcggcgacggacgagtcctcggcgagcaggcgagcggctcgactgagcttgccgtgctggacggcgatggcaatccgacgaggcagcgatgactccgacggccgagcgaccgaaggggacggccagtcgacggcttgtgtctctgcccgctcggctcggcggcatgggcctcctctcgcacgccgaggtctcaccccacgctcgagctgccatggccgagtcggccgacgcccagctcaaggtcgcctttgccgatgccgacgaccttgccgaggtcgaggacgatgtcgtccagccgacgtcgcagcgggcccggtgcctttacaacgcctcatgggacccttggtacagtgcacgctgggcggtccaccctgtgggcttgggtcaccaggccccggggtgggctgcccggtttgcactgccgccgaagggtacctgagcagcgtcgtaagcgtgggccagaaccagactatggttccggccaatcgtttacaacgcctcatgggagcgctccggcctcggtcgagagcacgtagatgtcgtcgaggtaggcgagaacggcatgtgagtcgccgaggtcggcctgaagggcctcgacggtgttgcggatgccgagcgagaacagaagcgggccgagagggtcgccttgacggacgccctggctggactcgagcgcggtgaccgagccgtcggacggacgagtcctcggcgagcaggcgagcggctcgactgagcttgccgtgctggacggcgatggcaatccgacgaggcagcgatgactccgacggccgagcgaccgaaggggacggccagtcgacggcaggaaacgcggcgagatgggctttgccggcggcaggcgagacggacgtcgcgagctcccggcaccggctgggcgcagcgcgggaacctgagcgcgccaccagcgcctgacgatggcccagcggccacccgggcgccacgccctggagtccgccggactctttcctcctctctcttttcgctccctcctcttagctagacgaccgctcgctccccctcctaaacctcagtcgttcacggagttcggccctctgctcttctcgatcggcgcgcgcaacaccctcgccgctctcgaacggcacctcggcccgggccacgccttgctcgcctacctcgacgacgtgtacatcctgtcggaggagcccggcgcgctggactcggttgccaccttcttcgacgaacgtcccgcgtgcgggcttgcgctcaagttgagcgcaagcccgcacgcggggtgtccgtcgaagaaggcggcgaccgagtccagcgcgccgggctcctccgacaggatgtacacgtcgtcgaggtaggcgagcaaggcgtggcccgggccgaggtgccgttcgagagcggcgagggtgttgcgcgcgccgatcgaaaagagcagagggccagcgccggagctaggcctaccttgggcagcgcgaggaagtcgaacagccgagcctcggttggttcctcgatgtaggccttagcgagcgagccagcaacgagggcgaatggcttggaccacgcgagagggagcggcttgtggacggtccggcaggctgccagggtggcgaaccggtcgacgagacctccttcccttctacgcgatcctacgatctatccccaacaaactgctgggggtgattgctatgcttgcggcccttctagtccttatggttctgcccgtctcagacacaggccgaacgcgttcggcctgtgtctgagacgggcagaaccataaggactagaagggccgcaagcatagcaataccagctgccggccatcgaccggctcgccgacctgccgcctcaggaggccctcctactgctccgccaatgcttgcaggccaacctccggcaccttcagcgctcgcttcgaacggacgaccttgactcaccctggctcacgctcgacaacgcgctgctcgagcggctgctcctcatccgcgggggtgctgccgcttgaggtgctcgagcaggttgacgtacgggttgctgcaaagggggcaagcgaccggtgccatggcggtgggtgcgagccgagctacagtgggagccactggtgaccgagccacaacgccgatggcaacggggggtggggtcgggtcgggtcgggttgcctggtgtagggagggatggggcacgggtgcctgcatagaagacggcaccgggtgggccctcaagcgccggagggctccggtccctcaatcgccggagggctccctttttcatgcccctcgtccggggccggccccggacgaggggcatgaaaaagggagccctccggcgattgagggaccggagccctccggtaaggattgacagcccttgttttcacactatacaggacggcagagttgttacccttgccacgccctgtacacgattctcaaagcccgaaggctgatccctctctccgctgggcgtcccgggacgcccagcggagagagggatcagccttcgggctttgagaatcgtgtacagggcgtggcactgcgttcggccccgcatagccatgcattctgtggaggtctaggcttaaaccacctaggcttgtctgcgaaatgtgacataaagtgccgccagtatccgtcggcgaggagggcgtcccgggacgccctcctcgccgacggatactggcggcactttatgtcacatttcgcagacaagcctatgcagcgcgttccggcggccggcagaccgaaagaagatgcctaacgttcaggacactccactgagcgtcaaggcactcgactcgacccaggccgcgacattctatgggcgcaactggcgcgtcatcccttccgaattcggtcctccgacggacggtctaggcctcaagtcgaatatgcgccacctcgtcgtctggcatcggacgctggcctcgcgacgctgcctgcccgcctcggaggcatgggcctactgtcgcacgccgagtgctcgccgcacgcccgggccgccatggccgagtctgccgaccttctcgtcgacgctgctctctccccggctgacgaccccgacccggacgcggcccacctcgacgacgtgtacatcctgtcggaggagcccggcgccctggactcggttgccgccttcttcgacgaacgtcccgcgtgcgggcttgcgctcaacctgcgcaagtgtcacgagacgccgctcgccatcgtcgctcaggacggcctcgaagtcctcggcacctgcgtcggccctcctgcaatagcaatccgacgaggcagcgatgactccgacggccgagcgactgagggagacggccagtcgacggcaggaaacgcggcgagatgggctttgccggcggcaggcgagacggacgtcgcgagctcaagcgccggagctaggcctaccttgggcagcgcgaggaagtcgaacagccgagggaaagagtccggcggactccagggcgtggcgcccgggtggccgctgggcggtcgtcaggcgctggcggcgcgcccaggttcccgcgctgcgcccagccggtgccggcgcagcaacaccttcaacacctccccgcgacctctgtatcatcgccgcccggcgagacgcagcaggtcgccgttgactcgttcaagcctgacacggcccctggcgtttccggttggacggccccgctcctcggccacgctctgggcaacgccgacgtctccgccttcgtcctgctcctcacacggcaggtcgcccagggaatcgctcctgcccagcagctcccttgcgcgtcgaggctcaccccgctccttccctcgagagggacggtcatcggccaccgtctgagcccgatcgggttgacccatgtcaatcaccgaagaggacccaaccgagctgactgacaaggctcgacgacggagggcatgccctgggcgacggacaggaaggacgtcgatcgatgacccgtccgaagacaggctcgcgcgacggtgtcgcccccttccggtcggtgctcgagctgtcggacgccgaggtcgcttctggtcttcacttacggacgctctgccccggctcgctcgacttctgcgccgactgtggcgacgcagctccgttcggtcacgacgaggcctgctcgggtcgtgctccggtcgctctcggtcgacacggagggtcgagttcatcggcgtgcggcgcggagcgatgtcggtcgagtcgaaccggtcgaggacctcgtcaatgtaggccgtctgtgtgatgctgaccgtgccggtcgcccggtcccgggtgaactccattccgagcagctcaccagggtcgagcgagcctcggtcgtcaacctcaaaggccctctcacgacgccgccttactgctccgccaatgcttgcaggcgagccttcctcgaccggcgcatcgccgaccagctgccggccatcgaccggctcgccgacctgccgcctcaggaggccctcttactgctccgccaatgcttgcaggccaacctccggcaccttcagcgctcgtgctggcgggacaagcaaaaagagaacattagccccatgggggggtcgaacccccagccttcagatgaaaccccgctgctttgaacagactgtgttaagagtctgacgctctaccgattgagctaacagggcgcgttgagattttggtttgaaaatgacgtgtctatcgcaaagggtgctgccgcttgaggtgctcgagcaggttgacgtacgggttgctgcagagggggcaagcaaccggtgccatggcggtgggtgcgagccgagctacagtgggagccactcttttagggttagggtgtaacgggcatgcaatgacaaaggcgggtctatggacgggaggcgaggttgtggctcggtcaccagtggctcccactgtagctcggctcgcacccaccgccatggcaccggtcgcttgccccctttgcagcaacccgtacgtcaacctgctcgagcacctcaagcggcagcaccctggtcgtcggctcagccgctcgcagctcctcgtgaccggcctcttcgcggtcgtccttacctcgagcgaaggcgtccgccaaggcgaccctctcggccctctgctcttttcgatcggcgcgcgcaacaccctcgccgctctcgaacggcacctcggcccgggccacgccttgctcgcctacctcgacgacgtgtacatcctgtcggaggagcccggcgcgcccctgggcgacctgccgtgtgaggagcaggacgaaggccgagacgtcggcgttgcccagagcgtggccgaggagcggggccgtccaaccggaaacgccaggggccgtgtcaggcttgaacgagtcaaagcactgcctgatgaggtcgagcgacggcagagacgacgaagccgcgagacgaacagcggcgtcggcgtatcgtacgcccagcggccggcgcgatagagggccggagcatgctgcgacagggccttggcgagcgaccgacggtcgagcgagttaaaggcgttggcaaagtcgagcgacgtgacgtgggtgaacggcttggggaggttgccatcgagggccccgcggctccgtcttctttgccgtcgctcgacctcatcaggcagtgcttcgactcgttcaagcctgacacggcccctggcgtttccggttggacggcctcgctcctcggccacgctctgggcaacgccgacgtctcggccttcgtcctgctcctcacacggcaggtcgcccaggggctgaaggtgccggaggttggcctgcaagcattggcggagcagtaggagggcctcctgaggcggcaggtcggcgagccggtcgatggccggcagctggtcggcgatgcgccggtcgaggaaggcagctcgaacgtcaggagggccgatgcaagtcccgaggacctcgaggccggggggggatttagccccaccacagggggtggaggcccgcctatctagccgggctagggaaccccatgttgtcggctgcgccgacgggggggatttagccccaccacagggggtggaggcccgcctatctagccgggctagggaaccccatgttgtcggctgcgccgacggggagaccggaccgacggggtgcttggaggcaagagcggcaatggtggccggcgtgaggtcggcgacggacgagtcctcggcgagcaggcgagcggctcgactgagcttgccgtgctggacggcgatggcaatccgacgaggcagcgatgactccgacggccgagcgaccgaggggctcgccgcacgcccgggccgccatggccgagtctgccgacctgctcgtcgacgctgccctctccccggccgacgaccccgacccggacgcggcccccgtcatcgtctcccagcgcgctcgctgccaggccgccttcgccacccgtcgcgaggctctactctgtgcgttgcgacgaacgagggccttggtaaccagccggtacaggagctcgccaaccgcgattggccggatgccgccgtcggccttgaggagcggcgtgagcctcgacgcgcaaaggagctgctggccaggagcgataccctgggcgacctgccgtgtgaggagcaggacgaaggccgagagcaacgcacagagtagagcctcgcgacgggtggcgaaggcggcttggcagcgagcgcgctgggagacgatgacgggggccgcgtccgggtcggggtcgtcggccggggagagggcagcgtcgacgagaaggtcggcagactcggccatggcggcccgggcgtgcggcgagcgctcgccgcacgcccgggccgccatggccgagtctgccgaccttctcgtcgacgctgccctctccccggccgacgaccccgacccggacgcggcccccgtcatcgtctcccagcgcgctcgctgccaggccgccttcgccacccgtcgcgaggctctactctgtgcgttgcgaagttagggttacgcttcatcgaacgtaacacgctttacctccttccgtaacatcactctcttgcccttacggcttcctccctcatagcaattttcaaggcgcaagtcctcatgtatcttaagcgttcacccgactgccttgtcccctgcaaggccgtgtcgttcaacatccctcgagagggacggtcatcggccaccgcctgagcccgatcgggttgagccatgtcaatcaccgaagaggacccaaccgagctgactgacaaggctcgacgacggagggcatgccctgggcgacgaacaggaaggacgtcgatcgatgacccgtccgaagacaggccctctcgagggagctaccacggtcctgtcgcagggcgccggtgccctccaggaccaacaacgatgggacaaacgggcacgtcggcgggcgggccctcaacctcgggctccaacaacgggaggagagcagaggcggcctcttcccagtcgcgggcggccgaccctgaactgcacgtcccggcttacgcctctgctcaagtcggacggcggcatccggcctatcgccgtcggcgagctcctctaccggcttgtctccaagtcgctcgtccggcacttctcggcgccctcccagctcctcccttggcagttcggcgtcggcagccccggcggtactggccgggctagggaaccccatgttgtcggctgcgccgacgggggggatttagccccaccacagggggtggaggcccgcctatctagccgggctagggaaccccatgttgtcggctgcgccgacgggggggatttagccccaccacagggggtggaggcccgcctatagatggcccgctccgagggggtctggacgtaagctcgggcacatgaagcagcagccgcgacaaaaggcttagcccaagagggtggcagcggtttgtagacggtagcgcaactggccagcgaagcgaagcgttcgatcagaccctctggtgcgggggacggcgatctcctctacgccaagctcgacgagccgatctggatgaccccaccgcccggctacgccgactcgcccgatcagctgtgctacgtcagctcggccgtctacggcctgcgccagtcgccgaaggctttctatgaccgaatcgcttcgttcctggtcagcatcggcctcgtacagcatgaggaggactttctggccgtgccgctgaccgaggaagacacacttgtccgactcaatcgggacgaggccgatgctgaccaggaacgaagcgattcggtcgtagaaagccttcggcgactggcgcaggccgtagacggccgagctgacgtagcacactcgcgtcgcgctcgagcctttcgtcccgggctctcaccagcgcacggacttgcgcgtgaccggccctggctcgttcggcggtcctgtctccgagtacgacgttgccgtcgtgtctgcggcgaccctcgctggccgtgatccgattgccactgccgacgtcgccccttgtgcgacgtgccgtgtgagaaggagcacgaaagcggcgacgtccgggtcggcgagcgcatggccgagcaggggcggggtccatcccgagacacccggggccgtgtcgggcttgaaggccgcgaagcagtccttgatgagggccagctcgggcagcgacgataggcgggcctccaccccctgtggtggggctaaaccccccccgtcggcgcagccgacaacatggggttccctagcccggctagataggcgggcctccaccccctgtggtggggctaaatccccccccgtcggcgcagccgacaacatggggttccctagcccgtggaactctttctccttcgactgttgccctctttgctcactggcggggcctgatgccccgctatggtctcttctctcgcctcctctcgcttcctctgccccgtgcccgtgctcgcttcttcgccttttaggcgaagccccttagccacttgaactccttctaccaggcaacccgacccgacccgaccccaccccccgttgccatcggcgttgtggctcggtcaccagtggctcccactgtagctcggctcgcacccaccgccatggcaccggttgcttgccccctctgcagcaacccgtacgtcaacctgctcgagcacctcaataggcgggcctccaccccctgtggtggggctaaaccccccccgtcggcgcagccgacaacatggggttccctagcccggctagataggcgggcctccaccccctgtggtggggctaaatcccccccgtcggcgcagccgacaacatggggttccctagccccccacagggtggaccgcccagcgtgcactgtaccaaggttcccatgaggcgttgtaaacgattggccggaaccatagtctggttctggcccacgcttacgagacgctgctcaggtacccttcggcggcagtgcaaaccgggcagcccaccccggggcctgggccatcgccgtccagcacggcaagctcagtcgagccgctcgcctgctcgccgaggactcgtccgtcgccgacctcacgccggccaccattgccgctcttgcctccaagcaccccgtcggtccggtctcgcccttcggccctcggtcaggcgcggctccgtcgagggacggtcatcggccaccgtctgagcccggtcgagttgacccatgtcaatcaccgaagaggacccagccgagctgactgacaaggctcgacgacggagggcatgccctgggcgacgaacaggaaggacgtcgatcgatgacccgtccgaagacaggcacatcaggagggccgacgcaggtgccgaggacctcgaggccgtccggagcgacgatagcgagcggcgtctcgtgacacttgcgcaggttgagcgcaagcccgcacgcgggacgttcgtcgaagaaggcggcgaccgagtccagggcgccgggctcctccgctggccgtgatccgatcggctctgccgacgtcgccggccttccgtcgtcgctgctgcctgctggtgtctctgccgacgctgcgccgcgtactgcttgcgcctctggttctctcctcaaccaactcacttcagctgagaaccagaagcgctcaaagtacgctctcgcgtggtccaagccattcgccctcgttgctggctcgctcgctaaggcctacatcgaggaaccaaccgcggctcggctgttccacctcctcccgctgcccaaggcaggcccagccccggcgcttgagctcgcgacgtccgcctcgcctgccgccgcccacagggtggaccgcccagcgtgcactgtaccaaggttcccatgaggcgttgtaaacgattggccggaaccatagtctggttctggcccacgcttacgacgctgctcaggtacccttcggcggcagtgcaaaccgggcagcccaccccggggcctgggacgtcccgaccccgcttgtcgtctcggccgtcggcggcgacgctccggtcgtccttacctcaagcgaaggcgtccgccaaggcgaccctctcggccctctgctcttttcgatcggcgcgcgcaacatcctcgccgctctcgaacggcacctcggccctcgaactcggacagcgggccgttgtacgaggccgtgccggcaatgcgcaagtcggtccggaggtgcgagcccgggacgaacggctcgagcttgaccgtcgtgccggcgatcgacttgaggtgcttggcaaggagagctttgacctgctcgtgccgagccggtcagtcgagggcagggcggccaggagggactcgcgacgcttgacgaaggccgtctggcaccgggcccgctgcgacgtcggctggacgacatcgtcctcgacctcggcaagatcgtcggcatcggcaaaggcgaccttgagctgggcgtcggccgtctgccccggccaggacgaccactgctcacattgctcgctgcccaacgtcgtcggccatgacgacgtttgctcggcccgtcccctctggcgtgtcgctcggcacgagcacgtcaaaggcctgctctcgcgccatctcggctccatcccccgcactcatgcttgcaggccaacctccggcaccttcagcgctcgcttcgaacggacgaccttgactcaccctggctcacgctcgacaacgcgctgctcgagcggctgctcctcatccgcggctcacctcgtcgtttggcatcggacgccggcctcgcgacgcgcttgcaggccaacctccggcaccttcagcgctcgcttcgaacggacgaccttgactcaccctggctcacgctcgacaacgcgctgctcgagcggctgctcctcatccgcggctcacctcgtcgtcttacatcggacgctggcctcgcgacgcgcttgcaggccaacctccggcacctccagcgctcgcttcgaacggacgaccttgactcaccctggctcacgctcgacaacgcgctgctcgagcggctgctcctcatccgcggctcacctcgtcgtctggcatcggacgctggcctcgcgacgcgcgtcgcgaggccggcgtccgatgcaagacgacgaggtgagccgcggatgaggagcagccgctcgagcagcgcgttgtcgagcgtgagccagggcgagtcaaggtcgtccgttcgaagcgagcgctgaaggtgccggaggttggcctgcaagctcttttcgatcggcgcgcgcaacatcctcgccgctctcgaacggcacctcggcccgggccacgccttgctcgcctacctcgacgacgtgtacatcctgtcggaggagcccggcgccctggactcggtcgccgccttcttcgacgaacgtccccgaactgccaagggaggagctggctgggcgccgagaagtgccggacgagcgacttggagacaagccggtagaggagctcgccgacggcgataggccggatgccgccgtccgacttgagcagaggcgtaagccgggacgtgcagaggagctgcatgcgcaagtcggtccggaggtgcgagccagggacgaacggctcgagcttgaccgtcgtgccggcgatcgacttgaggtgcttggcaaggagagctttgacctgctcgtgccgagcgatgcgccagagcgggcgagcgccgcagacctcgtccctgcaagcattggcggagcagtaggagggcctcctgaggcggcaggtcggcgagccggtcgatggccggcagctggtcggcgatgcgccggtcgaggaaggcagcgcgaacgtcaggagggccgatacaagtcccgaggacctcgaggccgatgcgcaagtcggtccggaggtgcgagcccgggacgaacggctcgagcttgaccgtcgtgccggcgatcgacttgaggtgcttggcaaggagagctttgacctgctcgtgccgagcgatgcgccagagcgggcgagcgccgcagacctcgtcaccgagtccagggcgccgggctcctccgacaggatgtacacgtcgtcgaggtaggcgagcaaggcgtggcccgggccgaggtgccgttcgagagcggcgaggatgttgcgcgcgccgatcgaaaagagcagagggccgagagggtcgccttgtccggcacttctcggcgccctcacagctcctcccttggcagttcggcgtcggcagccccggcggtactgagcccatcacccgggccatcgagcgtgccattgactttgacttgccggccccgtaccagcacgtcacctcgctcgacttcaagacgaacagcggcgtcggcgtgtcgtacgcccagcgaccagcgcggtagagggccggagcatgctgcgacagggccttggcgagcgaccgacggtcgagcgagttgaaggcgttggcaaagtcgagtgaggtgacgtgggtgaacggctgcagagggtcagaggcgctatggacggtggtacattggaggcgagaaggagttcaagtggctaaggggcttcgcctaaaaggcgaagaagcgagcacgggcacggagcagagagagcgagaggaggcgagagaagagaccatagcggggagggccgtcgacgaagcctgcggcggacagaggtaacagtcagcctcgcgaccgagagcgcccggcagacgactgtgggccaggagcaagagcgagggcaggggacgtacagccttgcgccgtccagtccgaggggagtgtctgcgatgcgccgagaagtgccggacgagcgacttggagacaagccggtagaggagctcgccgacggcgataggccggatgccgccgtccgacttgagcagaggcgtaagccgggacgtgcagaggagctgctggccgggtgccgtgccttgtgctgtagctcggctcgcacccaccgccatggcaccggttgcttgccccctctgcagcaacccgtacgtcaacctgctcgagcacctcaagcggcagcaccccggtcgtcggctcagccgctcgcagcttttcgtgaccggcctcttcgcctgcaagcattggcggagcagtaagagggcctcctgaggcggcaggtcggcgagccggtcgatggccggcagctggtcggcgatgcgccggtcgaggaaggcagcgcgaacgtcaggagggccgatgcaagtcccgaggacctcgaaacgtaacacgctttacctccctccgtaacatcactctcttgcccttacggcttcctccctcatagcaattttcaaggcgcaagtcctcatgtatcttaagcgttcacccgactgccttgtcccctgtaaggccgtgtcgttcaacagacgaacgagggccttggtaaccagccggtacaggagctcgccaaccgcgatcggccggatgccgccgtcggccttgaggagcggcgtgagcctcgacgcgcaaaggagctgctggccaggagcgatgccctgggcgacctgccgtggacgaacgagggccttggtaaccagccggtacaggagctcgccaaccgcgatcggccggatgccgccgtcggccttgaggagcggcgtgagcctcgacgcgcaaaggagctgctggccaggagcgattccctgggcgacctgccgtgcacggcaggtcgcccagggaatcgctcctggccagcagctcctttgcgcgtcgaggctcacgccgctcctcaaggccgacggcggcatccggccgatcgcggttggcgagctcctgtaccggctggtcaccaaggccctcgttcgtccctaaccctaaaagaacctgaccgccatggcaccggttgcttgccccctctgcagcaacccgtacgtcaacctgctcgagcacctcaagcggcagcaccccggtcgtcggctcagccgctcgcagcttttcgtgaccggcctcttcggcaacttctctgcacgtctcggctcacgcctctgctcaagtcggacggcggcatccggcctatcgccgtcggcgagctcctctaccggcttgtctccaagtcgctcgtccggcacttctcggcgcccagccagctcctcccttggcctcgcccggtccatttgtcgcctcgcccacgggctcggtcagctcggacggctcgctgctcgtcgttcggcccgccgctgctcgtcatcgtgcctcggtcggcggtgctcgacctgtcgtcccctcgacctcgcacacccctcagggacatgggtcaacccgatcgggctcagacggtggccgatgaccgtccctctcgagggagctaccacggtcctgtcgcagggcgccggtgccctccaggaccaacaacgatgggacaaacgggcacgtcggcgggcgggccctcaatcgtacgcccagcgaccagcgcggtagagggccggagcatgctgcgacagggccttggcgagcgaccgacggtcgagcgagttgaaggcgttggcaaagtcgagtgaggtgacgtgggtgaacggcttggggaggttgccatcgacccgttacaccctaacccccctaaccctaaaagggctcggtcaccagtggctcccactgtagctcggctcgcacccaccgccatggcaccggttgcttgccccctctgcagcaacccgtacgtcaacctgctcgagcacctcaagcgtgaacgactgaggtttaggagggggagcgagcggtcgtctagctaagaggagggagcgaaaagagagaggaggaaagagtccggcggactccagggcgtggcgcccgggtggccgctgggcggtcaccaggcgctggcggcgcaaggtcggcagaggcaatcggatcacggccagcaagggtcgccgcagacacgacggcaacgtcgtactcggagacaggaccgccgaacgagccagggccggtcacgcgcaagtccgtgcgctggtgggagccagggacgaaagaccctaacctaaccctaaccctaaaagaacctcgaccggcgcatcgccgaccagctgccggccatcgaccggctcgccgacctgccgcctcaggaggccctcttactgctccgccaatgcttgcaggccaacctccggcaccttaccgcttctcgttctcgaccagggtgagggggacgagaaggctggaggtggcgagggcagcggcagggagggaggcgtcgagcgagggcagggaggaggtggcagaggcagaggcagcagcagagagggaaagagaagcgggagaccgcttctcgttctcgaccagggtgagggggacgagaaggctggaggtggcgagggcagcggcagggagggaggcgtcgagcgagggcagggaggaggtggcagaggcagaggcagcagcagagagaaaaagagaagcgggagaccctaaaagaacctgaccgccatggcaccggttgcttgccccctctgcagcaacccgtacgtcaacctgctcgagcacctcaagcggcagcaccccggtcgtcggctcagccgctcgcagctcctcgtgaccggcctcttcgtggcagaggacgcaggcaacgcacagagtagagcctcgcgacgggtggcgaaggcggcctggcagcgagcgcgctgggagacgatgacgggggccgcgtccgggtcggggtcgtcggccggggagagggcagcgtcgacgagcagagggggcaagcaaccggtgccatggcggtgggtgcgagccgagctacagtgggagccactggtgaccgagccacaacgccgatggcaacggggggtggggtcgggtcgggtcgggttgcctggtgtagggtgtaacgggcgcctcaggaggctctcttactgctccgccaatgcttgcaggccaacctccggcaccttcagcgctcgcttcgaacggacgaccttgactcaccctggctcacgctcgacaacgcgctgctcgagcggctgctcctcatcccgcctcaggaggctctcttactgctccgccaatgcttgcaggccaacctccggcaccttcagcgctcgcttcgaacggacgaccttgactcaccctggctcacgctcgacaacgcgctgctcgagcgactgctcctcatccgccctcaggaggccctcttactgctccgccaatgcttgcaggccaacctccggcaccttcagcgctcgcttcgaacggacgaccttgactcaccctggctcacgctcgacaacgcgctgctcgagcgactgctcctcatccacaggggctcgccgaccgcgattggccggatgccgccgtcggccttgaggagcggcgtgagcctcgacgcgcaaaggagctgctggccaggagcgatgccctgggcgacctgccgtgtgaggagcagaacgaaggccgagaaccctaaaagaaccgcccggtccatttgtcgcctcacccacgagctcggtcagctcggacggctcgctgctcgtcgttcggcccgccgctgctcgtcgtcgtgcctcggtcggcggtgctcgacctgtcgtcccctcggcggcgagccgagcgacgataccgagagggcacgaggacgggccggacgacgagctggtgtggcgacgaccggtggcgagacaggccgaccgtttgaggagctggtcgacgacgacgacgacgacgacaagagggaggcccgaagcgagcgctgaaggtgccggaggttggcctgcaagcattggcggagcagtaagagggcctcctgaggcggcaggtcggcgagccggtcgatggccggcagctggtcggcgatgcgccggtcgaggttcttttagggtaccctaaccctaaccctaaaagaaccgcccggtccatttgtcgcctcacccacgagctcggtcagctcggacggctcgctgctcgtcgttcggcccgccgctgctcgtcgtcgtgcctcggtcggcggtgctcgacctgccgtgccggcaatgcgcaagtcggtccggaggtgcgagcccgggacgaacggctcgagcttgaccgtcgtgccggcgatcgacttgaggtgcttggcaaggagagctttgacctgctcgtgccgagcaatgcgccagacgaacggagctgcgtcgccacagtcggcgcagaagtcgagcgagccggggcagagcgtccggaagtgaagaccagaagcgacctcggcgtccgacagctcgagcaccgaccggaaggggacgacaccaagccaacgtctctggcgcatcgctcggcacgagcaggtcaaagctctccttgccaagcacctcaagtcgatcgccggcacgacggtcaagctcgagccgttcgtccctggctcgcacctccggaccgacttgcgcatcgccggcacggaccctaaaagaaccgccatggcaccggttgcttgccccctctgcagcaacccgtacgtcaacctgctcgagcacctcaagcggcagcaccccggtcgtcggctcagccgctcgcagctcctcgtgaccggcctcttcgtctggcgcatcgctcggcacgagcaggtcaaagctctccttgccaagcacctcaagtcgatcgccggcacgacggtcaagctcgagccgttcgtcccgggctcgcacctccggaccgacttgcgcattgccggcacgggcaggaaacgcggcgagatgggctttgccggcggcaggcgagacggacgtcgcgagctccagcgccggagctaggcctaccttgggcagcgcgaggaagtcgaacagccgagcctcggttggttcctttttttagggtaccctaaaagaacccaccgccatggcaccggttgcttgccccctctgcagcaacccgtacgtcaacctgctcgagcacctcaagcggcagcaccccggtcgtcggctcagccgctcgcagctcctcgtgaccggcctcggagctgggagggcgccgagaagtgccggacgagcgacttggagacaagccggtagaggagctcgccgacggcgataggccggatgccgccgtccgacttgagcagaggcgtaagccgggacgtgcagaggagctgcgctggccaggagcgatgccctgggcgacctgccgtgtgaggagcaggacgaaggccgagacgtcggcgttgcccagagcgtggccgaggagcggggccgtccaaccggaaacgccaggggccgtgtcaggcttgaaccgtcgcgcgagcctgtcttcggacgggtcatcgatcgacgtccttcctgttcgtcgcccagggcatgccctccgtcgtcgagccttgtcagtcagctcggttgggtcctcttcggtgattgacatgggtcaacccgaagtgctactgcgggccgtcgctcaacctctctggcgagatcgggaccaaggcggccgactcaggctgccaggtcgcctgcacgggcgacaagtcgcagatgtgtggcggctcgtaccggctccagctgtttcagcgatggcgacgctgctccgttcggtcacgacgaggcctgctcgggtcgtgctccggtcgctctcggtcgacacgagcaggtcaagcggctcatcaacaacaccctctcctcaaacatcaagtttcgtgttgttctcgagcaccctaaaagagtggctcccactgtagctcggctcgcacccaccgccatggcaccggttgcttgccccctctgcagcaacccgtacgtcaacctgctcgagcacctcaagcggcagcaccccggtcgtcggctcagcggttcttttagggttagggttagggttagggtgtaacgggcatgcaatgacaaaggcgggtctatggacgggaggcgaggagtttgagagttagacgaggggaggagacggaagcagaggaagggagcgcaacttagcgacctgaggaggcaacagggggcgacaagggctgggagctagaagcccgagcccgagaccagccagcgcattttgacttgccttggtgtgtcttgatgccggccaccgagatggccaaggcaccgcaaagacagcgcccgttacaccctaaaagaaccgcccggtccatttgtcgcctcacccacgagctcggtcagctcggacggctcgctgctcgtcgttcggcccgccgctgctcgtcgtcgtgcctcggtcggcggtgctcgacctggggcaagcgaccggtgccatggcggtgggtgcgagccgagctacagtgggagccactggtgaccgagccacaacgccgatggcaacggggggtggggtcgggtcgggtcgggttgcctggtgtagggtgtaacgggcgccggtcgaggaaggcagcgcgaacgtcaggagggccgatacaagtcccgaggacctcgaggccgttggcggcaaccgaggtaagcgacgactcctggcatttggcgacgttgagcgacaggccgggttagggttgagttggttgaggagagaaccagaggcgcaagcagtacgcggcgcagcgtcggcagagacaccagcaggcagcagcgacgacggaaggccggcgacgtcggcagagccgatcggatcacggccagcaagggtcttgactcgttcaagcctgacacggcctctggcgtttccggttggacggccccgctcctcggccacgctctgggcaacgccgacgtctcggccttcgtcctgctcctcacacggcaggtcgcccagggcatcgctcttgtagagctggagccggtacgagccgccacacatctgcgacttgtcgcccgtgcaggcgacctggcagcctgagtcggccgccttggtcccgatctcgccagagaggttgagcgacggcccgcagtagcactgagtagtgacgaacgagggccttggtgaccagccggtacaggagctcgccaaccgcgatcggccggatgccgccgtcggccttgaggagcggcgtgagcctcgacgcgcaaaggagctgctggccaggagcgatcccaccagcgctagcccgtccgccccgtttcggtggtagagtgagtggtcgaaggctgaccgcttgaacccgaacccctgcagagtcttgtccattgccgaccaccaggtgcgtcctgcctgcttcaggccgtcataacctgtaggacgagacaggaggcagggccgactcagtctcaggactactccgtgaacgactcatggatcccacctgtaggacgagacaggaggcagggccgactacagtgggggtgagctactacctagtgggcttgggtcaccaggccccggggtgggctgcccggtttgcactgccgccgaagggtacctgagcagcgtctcgtaagcgtgggccagaaccagactatggttccggccaatcgtttacaacgcctcatggcgaggagctgcgagcggctgagccgacgaccggggtgctgccgcttgaggtgctcgagcaggttgacgtacgggttgctgcagagggggcaagcaaccggtgccatggcggtgggttcttttagggttagggtaccctaaccctaaaagagtggctcccactgtagctcggctcgcacccaccgccatggcaccggttgcttgccccctctgcagcaacccgtacgtcaacctgctcgagcacctcaagcggcagcaccccggtcgctgcgagcggctgagccgacgaccggggtgctgccgcttgaggtgctcgagcaggttgacgtacgggttgctgcagagggggcaagcaaccggtgccatggcggtcaggttcttttagggttagggttagggtgtcggcaagcggaacccgcacaaggtcgtcttttcccgtgacgtcgtcttcgacgagggctggacaatgcgcacgaagggtagcgccagcagtgggagcggccagacggccacgatgacgccgttgactagcgccacgacgaggtctgcggcgctcgcccgctctggcgcatcgctcggcacgagcaggtcaaagctctccttgccaagcacctcaagtcgatcgccggcacgacggtcaagctcgagccgttcgtcccgggctgccacgacgaggtctgcggcgctcgcccgctctggcgcatcgctcggcacgagcaggtcaaagctctccttgccaagcacctcaagtcgatcgccggcacgacggtcaagctcgagccgttcgtccctggctcggcgtcgaggccctcgggactcgcatcggccctcctgacgttcgcgctgccttcctcgaccggcgcatcgccgaccagctgccggccatcgaccggctcgccgacctgccgcctcaggaggccctcttactagccagggacgaacggctcgagcttgaccgtcgtgccggcgatcgacttgaggtgcttggcaaggagagctttgacctgctcgtgccgagcgatgcgccagagcgggcgagcgccgcagacctcgtcatggcgctgaaggtgccggaggttggcctgcaagcattggcggagcagtaggagggcctcctgaggcggcaggtcggcgagccggtcgatggccggcagctggtcggcgatgcgccggtcgaggaaggcagcgcgaaagggttagggtgtaacgggcatgcaatgacaaaggcgggtctatggacgggaggcgaggagtttgagagttagacgaggggaggagacggaagcagaggaagggagcgcaacttagaaggcgaaaaagcgagcatagggcgttgtaaacgattggccggaaccatagtctggttctggcccacgcttacgagacgctgctcaggtacccttcggcggcagtgcaaaccgggcagcccaccccggggcctggtgacccagacccgcctacctcgacgacgtgtacatcctgtcggaggagcccggcgccctggactcggttgccgccttcttcgacgaacgtcccgcgtgcgggcttgcgctcaacctgcgcaagtgtcacgagacgccgctcgccttctaagttgcgctcccttcctctgcttccgtctcctcccctcgtctaactctcaaactcctcgcctcccgtccatagacccgcctttgtcattgcatgcccgttacaccctaaccctaaccctaaaagacctaaccctaaaagaacctgaccgccatggcaccggttgcttgccccctctgcagcaacccgtacgtcaacctgctcgagcacctcaagcggcagcaccccggtcgtcggctcagccgctcgcagctcctcagacgacggagccgcgcctgaccgagggccgaagggcgagaccggaccgacggggtgcttggaggcaagagcggcaatggtggccggcgtgaggtcggcgacggacgagtcctcggcgagcaggcgagcggttcgccttctaagttgcgctcccttcctctgcttccgtctcctcccctcgtctaactctcaaactcctcgcctcccgtccatagacccgcctttgtcattgcatgcccgttacaccctaaaagaaccgcccagcagcagcagcagcagcagcagcagcagcagcagcagcagcagcagcagcagcagcagcagcagcagcagcagcagcagcagcagcagcagcagcagcagcagcagcagcagcagcagcagcagcagccctccggccgaagtgacgacttaccagtccctgttgggctccgtcaactacctgtcggtcatgacgaggcccgacatcacccaggccgttaactatctctcccgcttccaggcccatcctggagcggcgccttctaagttgcgctcccttcctctgcttccgtctcctcccctcgtctaactctcaaactcctcgcctcccgtccatagacccgcctttgtcattgcatgcccgttacaccctaaccctaaccctaacccagcgctgaaggtgccggaggttggcctgcaagcattggcggagcagtaggagggcctcctgaggcggcaggtcggcgagccggtcgatggccggcagctggtcggcgatgcgccggtcgaggaaggcagcggttcttttagggttagggttagggtgtaacgggcatgcaatgacaaaggcgggtctatggacgggaggcgaggagtttgagagttagacgaggggaggagacggaagcagaggaagggagcgcaacttatcccaccagcgcacggacttgcgcgtgaccggccctggctcgttcggcggtcctgtctccgagtacgacgttgccgtcgtgtctgcggcgaccctcgctggccgtgatccgatcggctctgccgaccttgcgctgcccgagctggccctcatcaaggactgcttcgcggccttcaagcccgacacggccccgggtgtctcgggatggaccccgcccctgctcggccatgcgctcgccgacccggacgtcgccgccttcgtgggcgccgagaagtgccggacgagcgacttggagacaagccggtagaggagctcgccgacggcgataggccggatgccgccgtccgacttgagcagaggcgtaagccgggacgtgcagaggagctgctgtgctgatggcgagagcaccgcagacgcacccgaagaggccggtcacgaggagctgcgagcggctgagccgacgaccggggtgctgccgcttgaggtgctcgagcaggttgacgtacgggttgctgcaaatactgatggcgagagcaccgcagacgcacccgaagaggccggtcacgaggagctgcgagcggctgagccgacgaccggggtgctgccgcttgaggtgctcgagcaggttgacgtacgggttgctgcaaagccttctaagttgcgctcccttcctctgcttccgtctcctcccctcgtctaactctcaaactcctcgcctcccgtccatagacccgcctttgtcattgcatgcccgttacaccctaaaagaacctcgcctctgttgaacgacacggccttgcaggggacaaggcagtcgggtgaacgcttaagatacatgaggacttgcgccttgaaaattgctatgagggaggaagccgtaagggcaagagagtgatgttacggaagctccgtaacatcactctcttgcccttacggcttcctccctcatagcaattttcaaggcgcaagtcctcatgtatcttaagcgttcacccgactgccttgtcccctgcaaggccgtgtcgttcaacacgagggcgccgagaagtgccggacgagcgacttggagacaagccggtagaggagctcgccgacggcgataggccggatgccgccgtccgacttgagcagaggcgtgagccgagacgtgcagagaagttgctgaccctaaccctaaaagaacctgaccgccatggcaccggttgcttgccccctctgcagcaacccgtacgtcaacctgctcgagcacctcaagcggcagcaccccggtcgtcggctcagccgctcgcagctttagggttagggttagggtgtaacgggcatgcaatgacaaaggcgggtctatggacgggaggcgaggagtttgagagttagacgaggggaggagacggaagcagaggaagggagcgcaacttagaaggcctaagttgcgctcccttcctctgcttccgtctcctcccctcgtctaactctcaaactcctcgcctcccgtccatagacccgcctttgtcattgcatgcccgttacaccctaaccctaaaagaaccctaacgccttctaagttgcgctcccttcctctgcttccgtctcctcccctcgtctaactctcaaactcctcgcctcccgtccatagacccgcctttgtcattgcatgcccgttacaccctaaaagaacctcgaaaaaaaaaaaaaaaaaaaaaaaaaaaaaaaaaaaaaaaaaaaaaaaaaaaaaaaaaaaaaaaaaaaaaaaaaaaaaaaaaaaaaaaaaaaaaaaaaaaaaaaaaaaaaaaaaaaaaaaaaaaaaaaacgggttagggttagggtgtaacgggcatgcaatgacaaaggcgggtctatggacgggaggcgaggagtttgagagttagacgaggggaggagacggaagcagaggaagggagcgcaacttagaaggcggccttctaagttgcgctcccttcctctgcttccgtctcctcccctcgtctaactctcaaactcctcgcctcccgtccatagacccgcctttgtcattgcatgcccgttacaccctaaccctaacccggccccccccccccccccccccccccccccccccccccccccccccccccccccccccccccccccccccccccccccccccccccccccccccccccccccccccccccccccccccccccccccccccctttttcgccttctaagttgcgctcccttcctctgcttccgtctcctcccctcgtctaactctcaaactcctcgcctcccgtccatagacccgcctttgtcattgcatgcccgttacaccctaacccgtggcggttcttttagggtgtaacgggcatgcaatgacaaaggcgggtctatggacgggaggcgaggagtttgagagttagacgaggggaggagacggaagcagaggaagggagcgcaacttagaaggcgcctgttgaaggaagagcgtcgtggtagttttgcgggagggtcgccagcgccggcgcgctgcagcgcccgcccgcgcggcggcgccggaagttagggttacgcttcatcgaacgtaacacgctttaccatgttgaaggaagagcgtcgtggtagttttgcgggagggtcgccagcgccggcgcgctgcagcgcccgcccgcgcggcggcgccggaagttagggttacgcttcatcgaacgtaacacgctttacctcgggcgttgtaaacgattggccggaaccatagtctggttctggcccacgcttacgagacgctgctcaggtacccttcggcggcagtgcaaaccgggcagcccaccccggggcctggtgacccagacccaaggtaaagcgtgttacgttcgatgaagcgtaaccctaacttccggcgccgccgcgcgggcgggcgctgcagcgcgccggcgctggcgaccctcccgcaaaactaccacgacgctcttccttcaacaggggtggacaccgccccgcacgttgtcggctgcgccgacgggaggatttcgcccctccacagggggtgagagcccgcctatccagccgggctagggaaccccatgttgtcggctgcgccgacggggggggggtcggcagagccgatcggatcacggccagcgagggtcgccgcagacacgacggcaacgtcgtactcggagacaggaccgccgaacgagccagggccggtcacgcgcaagtccgtgcgctggtgggagcccccgtcggcgcagccgacaacatggggttccctagcccggctagataggcgggcctccaccccctgtggtggggctaaatcccccccgtcggcgcagccgacaacatggggttccctagcccggcttcgccttctaagttgcgctcccttcctctgcttccgtctcctcccctcgtctaactctcaaactcctcgcctcccgtccatagacccgcctttgtcattgcatgcccgttacaccctaaccctaaccccgccttctaagttgcgctcccttcctctgcttccgtctcctcccctcgtctaactctcaaactcctcgcctcccgtccatagacccgcctttgtcattgcatgcccgttacaccctaaccctaacccttcgccttctaagttgcgctcccttcctctgcttccgtctcctcccctcgtctaactctcaaactcctcgcctcccgtccatagacccgcctttgtcattgcatgcccgttacaccctaaccctaaaaa
